(19) United States
(12) Patent Application Publication
(10) Pub. No.: US 2026/0002208 A1
(43) Pub. Date: Jan. 1, 2026

(54) CHROMOSOME INTERACTIONS

(71) Applicant: OXFORD BIODYNAMICS PLC, Oxford Oxfordshire (GB)

(72) Inventors: Aroul Selvam Ramadass, Oxford Oxfordshire (GB); Ewan Hunter, Oxford Oxfordshire (GB); Alexandre Akoulitchev, Oxford Oxfordshire (GB)

(73) Assignee: OXFORD BIODYNAMICS PLC, Oxford Oxfordshire (GB)

(21) Appl. No.: 18/259,908

(22) PCT Filed: Jan. 6, 2022
(86) PCT No.: PCT/GB2022/050009

§ 371 Date: Jun. 29, 2023

Related U.S. Application Data
(60) Provisional application No. 63/134,776, filed on Jan. 7, 2021.
(60) Provisional application No. 63/134,765, filed on Jan. 7, 2021.
(60) Provisional application No. 63/163,700, filed on Mar. 19, 2021.
(60) Provisional application No. 63/163,698, filed on Mar. 19, 2021.

(51) Int. Cl. C12Q 1/6876; C12Q 1/48; C12Q 1/6806; C12Q 1/6827; C12Q 1/6851; C12Q 1/686

(52) U.S. Cl. CPC C12Q 1/6876; C12Q 1/48; C12Q 1/6806; C12Q 1/6827; C12Q 1/6851; C12Q 1/686; C12Y 207/07; C12Q 2600/106; C12Q 2600/118

(57) ABSTRACT

A process for analysing chromosome interactions relating to coronavirus infection.

### CROSS-REFERENCE

[0001] This application is a 371 National Stage filing and claims the benefit under 35 U.S.C. § 120 of International Application No. PCT/BGB2022/050009, filed 6 Jan. 2022, which claims priority to U.S. Provisional Application No. 63/134,765, filed 7 Jan. 2021; U.S. Provisional Application No. 63/163,698 filed 19 Mar. 2021; U.S. Provisional Application No. 63/134,776 filed 7 Jan. 2021; and U.S. Provisional Application No. 63/163,700 filed 19 Mar. 2021; each of which is incorporated herein by reference in its entirety.

### SEQUENCE LISTING INCORPORATION BY REFERENCE

[0002] The application herein incorporates by reference in its entirety the sequence listing material in the ASCII text file named “Corrected 12440_005US1_seq_listing_2_ST25.txt”, created Jul. 23, 2025, and having the size of 798,720 bytes.

### FIELD OF THE INVENTION

[0003] The invention relates to infectious disease processes.

### BACKGROUND OF THE INVENTION

[0004] Coronaviruses are a group of related RNA viruses that cause diseases in mammals and birds. In humans and birds, they cause respiratory tract infections that can range from mild to lethal. Mild illnesses in humans include some cases of the common cold, but there are more lethal varieties such as Covid-19.

### SUMMARY OF THE INVENTION

[0005] The inventors have identified chromosome conformation signatures relevant to coronavirus infection prognosis, and in particular to Covid-19 infection prognosis. This allows stratification of patients to identify prognostically in advance high-risk individuals who will progress to severe deterioration leading to the need for ICU (intensive care unit) support when they are exposed to coronavirus, and in particular to Covid-19. The decision to place a patient in ICU is based largely on the individual situation of the patient, and is normally done when there is clear clinical manifestation of complications which are not responding to clinical standards of care. Coronavirus complications, in all their wide manifestations, are linked to hyperinflammation, and immune overreaction targeting individual organs. The stable 3D genomic systemic profile analysed by the inventors carries strong prognostic information, discriminating asymptomatic, mild and severe (ICU) outcomes to lasting coronavirus infections before the outcomes manifested themselves.

[0006] Accordingly, the invention provides a method of detecting prognosis for coronavirus infection in an individual, comprising determining the presence or absence of one or more chromosome interactions represented by the probes shown in Table 1 or 3, to thereby determine said prognosis in the individual. The invention also provides a method of detecting prognosis for coronavirus infection in an individual comprising determining the presence or absence of one or more chromosome interactions represented by the probes shown in Table 7, to thereby determine said prognosis in the individual. The invention further provides a method of detecting prognosis for coronavirus infection in an individual comprising determining the presence or absence of one or more chromosome interactions represented by the probes shown in any of Tables 8, 9, 10 and 11, to thereby determine said prognosis in the individual.

[0007] The invention provides a method of determining prognosis for coronavirus infection in an individual comprising determining the presence or absence of one or more chromosome interactions represented by the probes shown in any of Tables 14, 15, 6 and 17, to thereby determine said prognosis in the individual.

[0008] The invention also provides a method of detecting the presence of, or susceptibility to sepsis, in an individual, comprising determining the presence or absence of one or more chromosome interactions represented by the probes shown in Table 12 or 13.

[0009] Preferably the method is carried out to select an individual for receiving therapy or a treatment. The method may be carried out on individual that has been preselected, for example, based on a physical characteristic, risk factor or the presence of a symptom.

### BRIEF DESCRIPTION OF THE DRAWINGS

[0010] FIG. 1 shows a preferred method for carrying out the marker detection step of the invention.

[0011] FIG. 2 shows leucocyte lineage.

[0012] FIG. 3 shows the study design.

[0013] FIG. 4 shows a PCA for 38 patients (from 3 cohorts) for asymptomatic (square), mild (triangle) and ICU (severe) (circle).

[0014] FIG. 5 shows a PCA only for mild and (circle) ICU (square).

[0015] FIG. 6 shows the analytical pipeline.

[0016] FIG. 7 shows 20 Hallmark GeneSets for ICU versus mild. The central column represents GeneSets shared between ICU and mild. The four sets on the bottom right indicated immune processes associated with ICU patients. These 20 gene sets are identified on the basis of the top EpiSwitch markers and their localisation at the gene position is described by GeneSets.

[0017] FIG. 8 shows BioCarta pathways for ICU versus mild. Shared gene sets are shown in the centre and the far left 7 gene sets show immune processes associated with ICU. This analysis is based on the genomic positions of the top EpiSwitch markers to see which overlapping genes are part of which pathways.

[0018] FIG. 9 shows top 20 reactome pathways for ICU versus mild. The 7 gene sets on the right of ICU relate to immune processes. Immune and angiotensin processes are shown in the mild. In this analysis the EpiSwitch positions were compared to the same genomic positions described in the reactome database.

[0019] FIG. 10 shows the top 100 significant markers for mild associated to immune processes. This is not a two dimensional PCA, but a similar single dimensional standard Linear Discriminant Analysis (all complexity reduce to one linear score for three clinical outcomes/phenotypes). It is produced on the basis of the top 100 significant markers, present only in mild cases and not asymptomatic or severe ICU, and overlapping in their positions with immuno-genetic loci in the genome (hence called Immune EpiSwitch markers). This analysis contains 80 patients: on top of three cohorts from UK (1) and USA (2), and has 42 patients from Lima, Peru, all collected at the time when Lima became the site of the highest fatalities from Covid-19. The top of the diagram is to the left of the page. The top set of circles is severe (bottom left of the page). The middle set of circles is mild (top of the page). The bottom set of circles is asymptomatic (to the middle right of the page).

[0020] FIG. 11 shows a genome view of the markers of FIG. 10.

[0021] FIG. 12 shows the top 100 significant markers for ICU that are associated with immune processes, showing ICU is a distinct phenotype. This analysis is done in the same way as for FIG. 10, except the top markers that were used were all statistically significant and present in ICU (severe) group of patients, not in the mild or asymptomatic. This demonstrates that on the basis of top markers unique to ICU outcomes and present in advance of complications at the time of blood collection and first Covid-19 testing, one can prognostically identify and distinguish the profile present for severe outcome, as a distinct phenotype in 3D genomics associated with a distinct clinical outcome. The top of the diagram is to the left of the page. The top set of circles is severe (top left of the page). The middle set of circles is mild (second set of circles from the bottom of the page). The bottom set of circles is asymptomatic (to the bottom right of the page).

[0022] FIG. 13 shows a genome view of the markers of FIG. 12.

[0023] FIG. 14 relates to the how the top 50 ICU markers associated with immune processes were selected for LDA analysis and classification statistics. The markers were selected using a 30 training sample set and then used to classify the 12 test set.

[0024] FIG. 15 shows enrichment of pathways using the genetic location enriched with the top 50 markers.

[0025] FIG. 16 shows enrichment of compounds using the genetic location enriched with the top 50 markers.

[0026] FIG. 17 shows the LDA plot of the 30 training set using the top 50 markers. The left of the page is the top of the diagram. The triangles at the top are severe (top left of the page). The circles at the bottom are mild (bottom right of the page).

[0027] FIG. 18 shows the LDA plot of the 30 training set with the 12 set test.

[0028] FIG. 19 shows patient calls by LDA on 42 patients from the Lima cohort and the efficacy of prognostic stratification by LDA calls.

[0029] FIG. 20 shows a standard STRING network analysis-functional protein association networks, where the immune genes that have ICU/Severe COVID associated EpiSwitch significant markers are overimposed onto the known interaction networks. It matches the known network very well and shows a highly connected part of the regulatory network through EpiSwitch dysregulated genes. No additional nodes form outside of Episwitch list had to be added for completion of the network. Table 5 shows the names of the key genes which are involved and provides further data.

[0030] FIG. 21 shows how Table 6 is to be interpreted.

[0031] FIG. 22 shows pathways which relate to both Covid infection and sepsis identified by analysis of the markers found in the present work. In particular PSMA5 is implicated, and HG38_1_109341939_109348573_109359719_109366704_RR (OBD183_q481.q483) is a shared marker. PSMA5, CD3D and CD3G are matched genes in the pathway relating to antigen processing-cross presentation and KLRG1, CD3D and CD3G are matched genes in the pathway related to immunoregulatory interactions between a lymphoid and non-lymphoid cell.

### DETAILED DESCRIPTION OF THE INVENTION

### Terms Used Herein

[0032] The method of the invention may be referred to as the ‘process’ of the invention herein.

[0033] The chromosome interactions which are typed may be referred to as ‘markers’, ‘CCS’, ‘chromosome conformation signature’, ‘epigenetic interaction’ or ‘EpiSwitch markers’ herein.

[0034] The word ‘type’ will be interpreted as per the context, but will usually refer to detection of whether a specific chromosome interaction is present or absent.

### The Epigenetic Interactions Relevant to the Invention

[0035] The chromosome interactions which are typed in the invention are typically interactions between distal regions of a chromosome, said interactions being dynamic and altering, forming or breaking depending upon the state of the region of the chromosome. That state will reflect different aspects of coronavirus infection and therefore the invention can be carried out to detect the prognosis for the infection, and in particular to detect susceptibility to severe disease (which may for example be characterised by any of the detrimental effects of the immune response mentioned herein).

[0036] The chromosome interaction may, for example, reflect if it is being transcribed or repressed. Chromosome interactions which are specific to coronavirus infection subgroups as defined herein have been found to be stable, thus providing a reliable means of measuring the differences between the two subgroups (for example reflecting different outcomes of the infection).

[0037] Chromosome interactions specific to coronavirus infection will normally occur early in the disease process, for example compared to other epigenetic markers such as methylation or changes to binding of histone proteins. Thus the process of the invention is able to detect disease at an early stage. This allows early intervention (for example treatment) which as a consequence will be more effective. Chromosome interactions also reflect the current state of the individual and therefore can be used to assess changes to disease status. Furthermore there is little variation in the relevant chromosome interactions between individuals within the same subgroup. Detecting chromosome interactions is highly informative with up to 50 different possible interactions per gene, and so processes of the invention can for example interrogate 500,000 possible different interactions.

[0038] Chromosomal interactions may overlap and include the regions of chromosomes shown to encode relevant or undescribed genes, but equally may be in intergenic regions. It should further be noted that the inventors have discovered that chromosome interactions in all regions are equally important in determining the status of a chromosomal locus.

[0039] The chromosome interactions which are detected in the invention could be impacted by changes to the underlying DNA sequence, by environmental factors, DNA methylation, non-coding antisense RNA transcripts, non-mutagenic carcinogens, histone modifications, chromatin remodelling and specific local DNA interactions. However it must be borne in mind that chromosome interactions as defined herein are a regulatory modality in their own right and do not have a one to one correspondence with any genetic marker (DNA sequence change) or any other epigenetic marker.

[0040] The chromosome interaction which is detected in the method of the invention can be in any gene, chromosome region defined in the tables, or in any pathway shown herein (for example in any gene in such a pathway).

[0041] Chromosome interactions may be impacted by changes to the underlying nucleic acid sequence which themselves do not directly affect a gene product or the mode of gene expression. Such changes may be for example, SNPs within and/or outside of the genes, gene fusions and/or deletions of intergenic DNA, microRNA, and non-coding RNA. For example, it is known that roughly 20% of SNPs are in non-coding regions, and therefore the process as described is also informative in non-coding situation. In one aspect the regions of the chromosome which come together to form the interaction are less than 5 kb, 3 kb, 1 kb, 500 base pairs or 200 base pairs apart on the same chromosome.

[0042] The chromosome interaction which is detected may be within a gene, such as any gene mentioned herein. However it may also be upstream or downstream of the gene, for example up to 50,000, up to 30,000, up to 20,000, up to 10,000 or up to 5000 bases upstream or downstream from the gene or from the coding sequence.

### The Process of the Invention

[0043] The process of the invention comprises a typing system for detecting chromosome interactions relevant to coronavirus infection prognosis. Any suitable typing method can be used, for example a method in which the proximity of the chromosomes in the interaction is detected. The typing method may be performed using the EpiSwitch™ system mentioned herein which for example may be carried out by a method comprising the following steps (for example on a sample from the subject):
[0044] (i) cross-linking regions of chromosome which have come together in a chromosome interaction,
[0045] (ii) optionally isolating the cross-linked DNA from said chromosomal locus
[0046] (iii) subjecting the cross-linked DNA to cleavage, and
[0047] (iv) ligating the nucleic acids present in the cross-linked entity to derive a ligated nucleic acid with sequence from both the regions which formed a chromosomal interaction.

[0048] Detection of this ligated nucleic acid allows determination of the presence or absence of a particular chromosome interaction. The ligated nucleic acid therefore acts as a marker for the presence of the chromosome interaction. Preferably the ligated nucleic acid is detected by PCR or a probe based method, including a qPCR method.

[0049] In the method the chromosomes can be cross-linked by any suitable means, for example by a cross-linking agent, which is typically a chemical compound. In a preferred aspect, the interactions are cross-linked using formaldehyde, but may also be cross-linked by any aldehyde, or D-Biotinoyl-e-aminocaproic acid-N-hydroxysuccinimide ester or Digoxigenin-3-O-methylcarbonyl-e-aminocaproic acid-N-hydroxysuccinimide ester. Para-formaldehyde can cross link DNA chains which are 4 Angstroms apart. Preferably the chromosome interactions are on the same chromosome. Typically the chromosome interactions are 2 to 10 Angstroms apart.

[0050] The cross-linking is preferably in vitro. The cleaving is preferably by restriction digestion with an enzyme, such as TaqI. The ligating may form DNA loops.

[0051] Where PCR (polymerase chain reaction) is used to detect or identify the ligated nucleic acid, the size of the PCR product produced may be indicative of the specific chromosome interaction which is present, and may therefore be used to identify the status of the locus. In preferred aspects the primers shown in any table herein are used, for example the primer pairs shown in Table 1 or 3 are used (corresponding to the chromosome interaction which is being detected). In other preferred aspects the primers shown in Table 8, 9, 10, 11, 12, 13, 14, 15, 16 or 17 are used (corresponding to the chromosome interaction which is being detected). Homologues of such primers or primer pairs may also be used, which can have at least 70% identity to the original sequence.

[0052] Where a probe is used to detect or identify the ligated nucleic acid this is generally by Watson-Crick based base-pairing between the probe and ligated nucleic acid. Probe sequences as shown in any table herein may be used, for example the probe sequences shown in Table 1 or 3 (corresponding to the chromosome interaction which is being detected). Probe sequences as shown in Table 8, 9, 10, 11, 12, 13 and 14 may used (corresponding to the chromosome interaction which is being detected). Homologues of such probe sequences may also be used, which can have at least 70% identity to the original sequence.

[0053] Typing according to the process of the invention may be carried out at multiple time points, for example to monitor the progression of the disease. This may be at one or more defined time points, for example at at least 1, 2, 5, 8 or 10 different time points. The durations between at least 1, 2, 5 or 8 of the time points may be at least 5, 10, 20, 50, 80 or 100 days. Typically there are 3 time points at least 50 days apart.

### Subgroups and Personalised Treatment

[0054] As used herein, a “subgroup” preferably refers to a population subgroup, more preferably a subgroup in the population of a particular organism such as a particular eukaryote, animal, bird or mammal. Most preferably, a “subgroup” refers to a subgroup in the human population. Therefore the process of the invention is preferably carried out to detect the presence of coronavirus infection in a eukaryote, such as an animal, mammal or bird, and preferably in a human. The process of the invention may be carried out for diagnostic or prognostic purposes.

[0055] The invention includes detecting and treating particular subgroups in a population, typically differing int their prognosis to coronavirus infection. The inventors have discovered that chromosome interactions differ between subsets (for example at least two subsets) in the relevant population. Identifying these differences will allow physicians to categorize their patients as a part of one subset of the population. The invention therefore provides physicians with a process of personalizing medicine for the patient based on their epigenetic chromosome interactions. Such testing may be used to select how to subsequently treat the patient, for example the type of drug and/or its dose and/or its frequency of administration.

The Individual that is Tested

[0056] The individual that is tested in the process of the invention may have been selected in some way, for example based on a risk factor or physical characteristic. The individual may have been selected based on being symptomless for a given disease, or being in the early stages of the disease or having a mild form of the disease.

[0057] The individual may be susceptible to any condition mentioned herein and/or may be in need of any therapy mentioned in. The individual may be receiving any therapy mentioned herein. In particular, the individual may have, or be suspected of having, coronavirus infection. The individual may have, or be suspected of having, Covid-19 infection. Thus the invention includes a process of typing a patient to determine coronavirus prognosis, which is equivalent to determining the subgroup they belong to.

[0058] The individual may have one or more of the following characteristics:
[0059] having received an organ transplant
[0060] having received chemotherapy or antibody treatment for cancer, including immunotherapy
[0061] having received intense course of radiotherapy (radical radiotherapy) for lung cancer
[0062] having received targeted cancer treatments that can affect the immune system (such as protein kinase inhibitors or PARP inhibitors)
[0063] they have, or have had, blood or bone marrow cancer (such as leukaemia, lymphoma or myeloma)
[0064] they have, or have had, a severe lung condition (such as cystic fibrosis, severe asthma or severe COPD)
[0065] a high risk of getting infections (such as SCID or sickle cell)
[0066] they are taking medicine that makes individuals much more likely to get infections (such as high doses of steroids or immunosuppressant medicine)
[0067] they are pregnant
[0068] have a problem with spleen or the spleen has been removed (splenectomy)
[0069] they have Down's syndrome
[0070] having dialysis or have severe (stage 5) long-term kidney disease
[0071] classed as clinically extremely vulnerable, based on clinical judgement and an assessment of their needs
[0072] are 70 years old or older
[0073] have a lung condition that is not severe (such as asthma, COPD, emphysema or bronchitis)
[0074] have heart disease (such as heart failure)
[0075] have diabetes
[0076] have liver disease (such as hepatitis)
[0077] have a condition affecting the brain or nerves (such as Parkinson's disease, motor neurone disease, multiple sclerosis or cerebral palsy
[0078] they are very obese (for example a BMI of 40 or above).
   The Prognosis which is Determined

[0079] The process of the invention preferably determines prognosis for the severity of disease caused by coronavirus, and preferably by Covid-19. Therefore the process may determine whether the individual has a prognosis of severe disease or mild disease. The process may determine whether the individual has prognosis of severe disease that will lead: to the need for ICU treatment, a cytokine storm (cytokine release syndrome), hyperinflammation or sepsis.

### Tables Provided Herein

[0080] Tables 1, 2, 3 and 4 show specific markers which can be used to detect coronavirus infection, i.e. their presence or absence can be used in such a detection (i.e. they are ‘disseminating’ markers). Tables 1 and 2 show markers which are present in individuals that have the prognosis of severe disease. Tables 3 and 4 shows markers which are present in individuals that have prognosis of mild disease. Tables 2 and 4 are subsets of markers from Table 1 and 3 respectively. The process of the invention can be carried out using markers from any one of Tables 1 to 4 or by using markers from more than one Table, for example using markers from both Table 1 and Table 3.

[0081] Table 7 shows a further set of markers which can be used to detect prognosis for coronavirus infection. The process of the invention may be carried out using only the markers of Table 7, or these markers may be combined with other markers as disclosed herein.

[0082] Tables 8, 9, 10, 11, 12, 13 and 14 show further sets of markers which can be used to detect prognosis for coronavirus infection. The process of the invention may be carried out using only the markers of any of Table 8, 9, 10, 11, 12, 13 and 14 or these markers may be combined with other markers as disclosed herein.

[0083] Table 8 includes markers which are associated with the severe phenotype. Markers where there is a ‘1’ in the LS column are associated with severe phenotype in this table. These are preferred markers to be used in the invention.

[0084] Table 9 shows preferred markers which are all associated with severe phenotype.

[0085] Table 10 includes markers which are associated with mild phenotype. Markers where there is a ‘-1’ in the LS column are associated with mild phenotype. These are preferred markers to be used in the invention.

[0086] Table 11 shows preferred markers which are all associated with mild phenotype.

[0087] Tables 12 and 13 show markers which can be used to determine sepsis status. The results in Table 12 relate to “S_SS” and “qPCR_ICU”. These are 27 markers which are ICU prognosis markers but have also been found to be significant and sepsis-specific in the analysis of patients with sepsis vs severe sepsis. The results in Table 13 relate to “H_SS” and “qPCR_ICU”. These are 5 markers are ICU prognosis markers that also come as significant and severe-sepsis specific in the analysis of patients with severe sepsis when comparing to healthy.

[0088] Tables 14 and 15 show preferred severe (ICU) disease markers, the ‘1’ in the CCS column representing that phenotype.

[0089] Tables 16 and 17 show preferred mild disease markers, the ‘-1’ in the CCS column representing that phenotype.

[0090] The markers are defined using probe sequences (which detect a ligated product as defined herein). The first two sets of Start-End positions show probe positions, and the second two sets of Start-End positions show the relevant 4 kb region. The markers may be defined with reference to the Start-End positions which are provided as these will uniquely identify the marker in the same way a probe sequence does.

[0091] The following information is provided in the probe data tables:
[0092] RP—Rsum the Rank Product statistics evaluated per each chromosome interaction.
[0093] FC—Interaction frequency (positive or negative).
[0094] Pfp—estimated percentage of false positive predictions (pfp), both considering positive and negative chromosome interactions.
[0095] Pval—estimated pvalues per each CCSs being positive and negative.
[0096] Adj.P.value (FDR)—False discovery rate adjusted p.value.
[0097] Loop Detected—which state the loop is found in.

[0098] Simple permutation-based estimation is used to determine how likely a given RP value or better is observed in a random experiment. This has the following steps:
[0099] 1. Generate p permutations of k rank lists of length n.
[0100] 2. Calculate the rank products of the n CCS in the p permutations.
[0101] 3. Count (c) how many times the rank products of the CCS in the permutations are smaller or equal to the observed rank product. Set c to this value.
[0102] 4. Calculate the average expected value for the rank product by: Erp(g)=c/p.
[0103] 5. Calculate the percentage of false positives as: pfp(g)=Erp(g)/rank (g) where rank(g) is the rank of CCS g in a list of all n CCSs sorted by increasing RP.

[0104] The rank product statistic ranks chromosome interactions according to intensities within each microarray and calculates the product of these ranks across multiple microarrays. This technique can identify chromosome interactions that are consistently detected among the most differential chromosome interactions in a number of replicated microarrays. Where the p-value is 0 this indicates that there is very little variation in the Rank Product of the CCS across the samples, this is a good example of the signal to noise and effect size of CCS. Where p value is 0 and pfp is 0 this means that permutated Rank Product doesn't differ from the actual observed Rank Product. These methods are described Breitling R and Herzyk P (2005) Rank-based methods as a non-parametric alternative of the t-test for the analysis of biological microarray data. J Bioinf Comp Biol 3, 1171-1189.

[0105] The FC indicates prevalence of marker in each comparison, 2 means twice over average test, 1.5 means 1.5 over the average test, etc., and so FC indicates the weight of a marker to phenotype/group. The FC value can be used to give an indication of how many markers are needed for a highly effective test. Individual markers are powerful indicators of prognosis, and typically 5 to 10 markers will give a highly effective test, though smaller numbers of markers will give a functional test for detection of coronavirus prognosis.

[0106] The probes are designed to be 30 bp away from the Taq1 site. In case of PCR, PCR primers are typically designed to detect ligated product but their locations from the Taq1 site vary. Probe locations:
[0107] Start 1—30 bases upstream of TaqI site on fragment 1
[0108] End 1—TaqI restriction site on fragment 1
[0109] Start 2—TaqI restriction site on fragment 2
[0110] End 2—30 bases downstream of TaqI site on fragment 2 4 kb Sequence Location:
[0111] Start 1—4000 bases upstream of TaqI site on fragment 1
[0112] End 1—TaqI restriction site on fragment 1
[0113] Start 2—TaqI restriction site on fragment 2
[0114] End 2—4000 bases downstream of TaqI site on fragment 2

[0115] Table 5 relates to the network analysis shown in FIG. 20 and shows the String functional sub-networks represented in this network, with the names of the key genes in the sub-network associated with EpiSwitch markers.

[0116] Table 6 provides a list of therapeutic compounds which have sets of affected gene associated with them (see #genes column) and have individual genes from that sets (see following columns #matching genes) associated with EpiSwitch significant markers specific for severe disease outcome (all of them being immune associated genes). In the table:
[0117] the column with total number of genes shows genes affected by the therapeutic agent
[0118] the column with matched genes shows the number of affected genes matching EpiSwitch markers.

[0119] The high scores that were obtained confirm the non-random selection of the matching genes, i.e. affected by 3D genome architecture in severe disease patients.

[0120] Table 7 shows a set of preferred markers for use in the invention, as well as preferred probe and PCR primers. The specific prognosis the presence of each marker is associated with is shown in the first column: ‘Mild’ denotes the clinical manifestation of COVID disease (as opposed to asymptomatic conditions), where the patient may even be hospitalised, but responds to a standard of care and remains stable; ‘ICU’ denotes a severe condition when the hospitalized patient does not respond to a standard of care on the hospital ward and requires Intensive Care Unit (ICU) support. Examples of severe (ICU) are hyperinflammation and need of mechanical ventilation.

[0121] Table 8 shows a set of markers for use in the invention. Any marker may be used from this table. Preferred markers have a ‘1’ in the LS column are associated with severe phenotype in this table, and so all these markers represent a preferred subset of markers from which markers can be chosen for use in the invention.

[0122] Table 9 shows markers which are all associated with severe phenotype. The table also shows preferred primer and probe sequences. These primers and probes can be used in a qPCR format for detection of the relevant marker.

[0123] Table 10 shows a set of markers for use in the invention. Any marker may be used from this table. Preferred markers have a ‘-1’ in the LS column are associated with mild phenotype in this table, and so all these markers represent a preferred subset of markers from which markers can be chosen for use in the invention.

[0124] Table 11 shows markers which are all associated with mild phenotype. The table also shows preferred primer and probe sequences. These primers and probes can be used in a qPCR format for detection of the relevant marker.

[0125] Tables 14 and 16 show preferred probe and primer sequences which can optionally be used in a qPCR format. Tables 15 and 17 show preferred primer sequences which can optionally be used in a nested PCR format.

### Preferred Marker Sets

[0126] The invention relates to detecting prognosis for coronavirus infection by typing chromosome interaction markers, such as any of the specific markers disclosed herein, for example in Table 1 or 3, or preferred combinations of markers, or markers in defined specific regions disclosed herein. Markers present in genes and regions mentioned in the tables may be typed. Specific markers are defined herein by location or by probe and/or primer sequences. Therefore preferred markers are those which are represented by the probes and/or primer pairs disclosed in tables herein.

[0127] The invention relates to detecting prognosis for coronavirus infection by typing chromosome interaction markers, such as any of the specific markers disclosed Table 8, 9, 10, 11, 14, 15, 16 or 17 or preferred combinations of markers from any of these tables, or markers in defined specific regions disclosed in any of these tables.

[0128] The invention relates to further detecting sepsis status during coronavirus infection by typing chromosome interaction markers, such as any of the specific markers disclosed Table 12 or 13, or preferred combinations of markers from any of these tables.

[0129] Combinations of markers can be defined in different ways, such as:
[0130] by ranking by any parameter defined herein, or
[0131] by any ‘part’ of Table 1 or 3,
[0132] by reference to the ‘number’ of the marker which is listed in the left hand column of the Tables.

[0133] In a preferred aspect at least 10 markers are typed from the top 40 markers for any parameter mentioned in the Tables, such as FC.

[0134] In one aspect one or more markers are typed which:
[0135] (i) are present in any one of the regions listed in Table 1 or 3; and/or
[0136] (ii) corresponds to any one of the chromosome interactions represented by any probe shown in Table 1 or 3; and/or
[0137] (iii) is present in a 4,000 base region which comprises or which flanks (i) or (ii).

[0138] In a preferred aspect:
[0139] at least 5 chromosome interactions are typed from Table 1, and/or
[0140] at least 5 chromosome interactions are typed from Table 3.

[0141] In another preferred aspect at least 5 chromosome interactions are typed selected from:
[0142] the top 40 interactions in Table 1 defined using any parameter, and/or
[0143] the top 40 interactions in Table 3 defined using any parameter.

[0144] Combinations of markers can be defined by any ‘part’ of Table 8, 9, 10, 11, 12, 13, 14, 15, 16 or 17.

[0145] In a preferred aspect at least 10 markers are typed from the top 40 markers for any parameter mentioned in the Tables, such as FC.

[0146] In one aspect one or more markers are typed which:
[0147] (i) are present in any one of the regions listed in Table 8, 9, 10 or 11; and/or
[0148] (ii) corresponds to any one of the chromosome interactions represented by any probe shown in Table 8, 9, 10 or 11; and/or
[0149] (iii) is present in a 4,000 base region which comprises or which flanks (i) or (ii).

[0150] In a preferred aspect:
[0151] at least 5 chromosome interactions are typed from Table 9, and/or
[0152] at least 5 chromosome interactions are typed from Table 11.

[0153] In another preferred aspect at least 5 chromosome interactions are typed selected from:
[0154] the top 40 interactions in Table 8 defined using any parameter, and/or
[0155] the top 40 interactions in Table 10 defined using any parameter.

### Preferred Numbers of Markers to be Typed

[0156] Typing a very low number of the markers disclosed herein will result in an effective test due to the nature of regulation by chromosome interaction, including their network-like properties. The different numbers and combination of markers give rise to different performance properties. Further as will be appreciated the markers can be selected from Table 1 or 3 as a whole or from the parts of the Tables defined by a number and letter (for example ‘a2’). Similarly markers can be selected from the whole or parts of any of Tables 8, 9, 10, 11, 14, 15, 16 or 17. Markers can also be selected from the whole or parts of Tables 12 and 13.

[0157] In one aspect the process comprises typing at least 3, 5, 8, 10, 15, 20, 50, 100, 150, 200, 250 or 300 of the chromosome interactions represented by the probes in Table 1. In one embodiment at least 10 chromosome interactions represented by the probes in Table 1 are typed.

[0158] In one aspect the process comprises typing at least 3, 5, 8, 10, 15, 20, 25 or 30 of the chromosome interactions represented by the probes in Table 2. In one embodiment at least 10 chromosome interactions represented by the probes in Table 2 are typed.

[0159] In one aspect the process comprises typing at least 3, 5, 8, 10, 15, 20, 50, 80, 100, 150 or 200 of the chromosome interactions represented by the probes in Table 3.

[0160] In one aspect the process comprises typing at least 3, 5, 8 or 10 of the chromosome interactions represented by the probes in Table 4. In one embodiment at least 10 chromosome interactions represented by the probes in Table 4 are typed.

[0161] In one aspect at least 3, 5, 8, 10, 15 or 20 chromosome interactions are typed from the top 40 markers in Table 1 defined using any parameter and/or at least 3, 5, 8, 10, 15 or 20 chromosome interactions are typed from the top 40 markers in Table 3 defined using any parameter.

[0162] In one aspect 2, 3, 4, 5 or 6 markers are types from Table 7. All 6 of the markers of Table 7 may be typed. In another aspect all 6 of the markers from Table 7 are typed together with at least 3, 5, 8, 10, 15 or 20 chromosome interactions from Table 1. In another aspect all 6 of the markers of Table 7 are typed together with at least 3, 5, 8, 10, 15 or 20 markers from Table 3.

[0163] In one aspect the process comprises typing at least 3, 5, 8, 10, 15, 20, 50, 100, 150, 200, 250 or 300 of the chromosome interactions represented by the probes in Table 8. Preferably at least 10 chromosome interactions represented by the probes in Table 8 are typed.

[0164] In one aspect the process comprises typing at least 3, 5, 8, 10, 15, 20, 50, 100, or all of the chromosome interactions shown in Table 8 which have a ‘1’ in the LS column. Preferably at least 10 chromosome interactions shown Table 8 which have ‘1’ in the LS column are typed.

[0165] In one aspect the process comprising typing at least 3, 5, 8, 10, 15, 20, 30 or all of the chromosome interactions shown in Table 9. Preferably at least 10 chromosome interactions represented by the probes in Table 9 are typed.

[0166] In one aspect the process comprises typing at least 3, 5, 8, 10, 15, 20, 50, 100, 150, 200 or all of the chromosome interactions represented by the probes in Table 10. Preferably at least 10 chromosome interactions represented by the probes in Table 10 are typed.

[0167] In one aspect the process comprises typing at least 3, 5, 8, 10, 15, 20, 50, 80, or all of the chromosome interactions shown in Table 10 which have a ‘-1’ in the LS column. Preferably at least 10 chromosome interactions shown Table 10 which have ‘-1’ in the LS column are typed.

[0168] In one aspect the process comprises typing at least 3, 5, 8, 10 or all of the chromosome interactions shown in Table 11. Preferably at least 10 chromosome interactions represented by the probes in Table 11 are typed.

[0169] In one aspect the process comprises typing at least 3, 5, 8, 10, 20, 25 or all of the chromosome interactions shown in Table 12. Preferably at least 10 chromosome interactions represented by the probes in Table 12 are typed.

[0170] In one aspect the process comprises typing at least 2, 3 or 5 of the chromosome interactions shown in Table 13. Preferably at least 5 chromosome interactions represented by the probes in Table 13 are typed.

[0171] In one aspect the process comprises typing at least 3, 5, 8, 10, 15, 20, 50, 70 or all of the chromosome interactions represented by the probes in Table 14. Preferably at least 10 chromosome interactions represented by the probes in Table 14 are typed.

[0172] In one aspect the process comprises typing at least 3, 5, 8, 10, 15, 20, 50, 100, 120, or all of the chromosome interactions represented by the probes in Table 15. Preferably at least 10 chromosome interactions represented by the probes in Table 15 are typed.

[0173] In one aspect the process comprises typing at least 3, 5, 8, 10, 15, 20, 40, or all of the chromosome interactions represented by the probes in Table 16. Preferably at least 10 chromosome interactions represented by the probes in Table 16 are typed.

[0174] In one aspect the process comprises typing at least 3, 5, 8, 10, 15, 20, 50, 80 or all of the chromosome interactions represented by the probes in Table 17. Preferably at least 10 chromosome interactions represented by the probes in Table 17 are typed.

### Types of Chromosome Interaction

[0175] In one aspect the locus (including the gene and/or place where the chromosome interaction is detected) may comprise a CTCF binding site. This is any sequence capable of binding transcription repressor CTCF. That sequence may consist of or comprise the sequence CCCTC which may be present in 1, 2 or 3 copies at the locus. The CTCF binding site sequence may comprise the sequence CCGCGNGGNGGCAG (in IUPAC notation). The CTCF binding site may be within at least 100, 500, 1000 or 4000 bases of the chromosome interaction or within any of the chromosome regions shown Table 1.

[0176] When detection is performed using a probe, typically sequence from both regions of the probe (i.e. from both sites of the chromosome interaction) could be detected. In preferred aspects probes are used in the process which comprise or consist of the same or complementary sequence to a probe shown in any table. In some aspects probes are used which comprise sequence which is homologous to any of the probe sequences shown in the tables.

### The Approach Taken to Identify Markers and Panels of Markers

[0177] The invention described herein relates to chromosome conformation profile and 3D architecture as a regulatory modality in its own right, closely linked to the phenotype. The discovery of biomarkers was based on annotations through pattern recognition and screening on representative cohorts of clinical samples representing the differences in phenotypes. We annotated and screened significant parts of the genome, across coding and non-coding parts and over large sways of non-coding 5′ and 3′ of known genes for identification of statistically disseminating consistent conditional disseminating chromosome conformations, which for example anchor in the non-coding sites within (intronic) or outside of open reading frames.

[0178] In selection of the best markers we are driven by statistical data and p values for the marker leads. Selected and validated chromosome conformations within the signature are disseminating stratifying entities in their own right, irrespective of the expression profiles of the genes used in the reference. Further work may be done on relevant regulatory modalities, such as SNPs at the anchoring sites, changes in gene transcription profiles, changes at the level of H3K27ac.

[0179] We are taking the question of clinical phenotype differences and their stratification from the basis of fundamental biology and epigenetic controls over phenotype-including for example from the framework of network of regulation. As such, to assist stratification, one can capture changes in the network and it is preferably done through signatures of several biomarkers, for example through following a machine learning algorithm for marker reduction which includes evaluating the optimal number of markers to stratify the testing cohort with minimal noise. This may end with 3-20 markers.

[0180] Selection of markers for panels may be done by cross-validation statistical performance (and not for example by the functional relevance of the neighbouring genes, used for the reference name).

[0181] A panel of markers (with names of adjacent genes) is a product of clustered selection from the screening across significant parts of the genome, in non-biased way analysing statistical disseminating powers over 14,000-60,000 annotated EpiSwitch sites across significant parts of the genome. It should not be perceived as a tailored capture of a chromosome conformation on the gene of know functional value for the question of stratification. The total number of sites for chromosome interaction are 1.2 million, and so the potential number of combinations is 1.2 million to the power 1.2 million. The approach that we have followed nevertheless allows the identifying of the relevant chromosome interactions.

[0182] The specific markers that are provided by this application have passed selection, being statistically (significantly) associated with the condition or subgroup. This is what the data in the relevant table demonstrates. Each marker can be seen as representing an event of biological epigenetic as part of network deregulation that is manifested in the relevant condition. In practical terms it means that these markers are prevalent across groups of patients when compared to controls. On average, as an example, an individual marker may typically be present in 80% of patients tested and in 10% of controls tested.

[0183] Simple addition of all markers would not directly represent the network interrelationships between some of the deregulations. This is where the standard multivariate biomarker analysis GLMNET (R package) can be brought in. GLMNET package helps to identify interdependence between some of the markers, that reflect their joint role in achieving deregulations leading to disease phenotype. Modelling and then testing markers with highest GLMNET scores offers not only identify the minimal number of markers that accurately identifies the patient cohort, but also the minimal number that offers the least false positive results in the control group of patients, due to background statistical noise of low prevalence in the control group. Typically a group (combination) of selected markers (such as 3 to 10) offers the best balance between both sensitivity and specificity of detection, emerging in the context of multivariate analysis from individual properties of all the selected statistical significant markers for the condition.

[0184] The tables herein show the reference names for the array probes (60-mer) for array analysis that overlaps the juncture between the long range interaction sites, the chromosome number and the start and end of two chromosomal fragments that come into juxtaposition. The name of each marker listed in a table gives the chromosome position numbers of the two regions which are recognised by the relevant probe, providing an alternative way of defining the chromosome interaction in a unique way.

### Samples and Sample Treatment

[0185] The process of the invention will normally be carried out on a sample. The sample may be obtained at a defined time point, for example at any time point defined herein. The sample will normally contain DNA from the individual. It will normally contain cells. In one aspect a sample is obtained by minimally invasive means, and may for example be a blood sample. DNA may be extracted and cut up with a standard restriction enzyme. This can pre-determine which chromosome conformations are retained and will be detected with the EpiSwitch™ platforms. Due to the synchronisation of chromosome interactions between tissues and blood, including horizontal transfer, a blood sample can be used to detect the chromosome interactions in tissues, such as tissues relevant to disease.

### Preferred Aspects for Sample Preparation and Chromosome Interaction Detection

[0186] Methods of preparing samples and detecting chromosome conformations are described herein. Optimised (non-conventional) versions of these processes can be used, for example as described in this section.

[0187] Typically the sample will contain at least 2×10⁵ cells. The sample may contain up to 5×10⁵ cells. In one aspect, the sample will contain 2×10⁵ to 5.5×10⁵ cells.

[0188] Crosslinking of epigenetic chromosomal interactions present at the chromosomal locus is described herein. This may be performed before cell lysis takes place. Cell lysis may be performed for 3 to 7 minutes, such as 4 to 6 or about 5 minutes. In some aspects, cell lysis is performed for at least 5 minutes and for less than 10 minutes.

[0189] Digesting DNA with a restriction enzyme is described herein. Typically, DNA restriction is performed at about 55° C. to about 70° C., such as for about 65° C., for a period of about 10 to 30 minutes, such as about 20 minutes.

[0190] Preferably a frequent cutter restriction enzyme is used which results in fragments of ligated DNA with an average fragment size up to 4000 base pair. Optionally the restriction enzyme results in fragments of ligated DNA have an average fragment size of about 200 to 300 base pairs, such as about 256 base pairs. In one aspect, the typical fragment size is from 200 base pairs to 4,000 base pairs, such as 400 to 2,000 or 500 to 1,000 base pairs.

[0191] In one aspect of the EpiSwitch process a DNA precipitation step is not performed between the DNA restriction digest step and the DNA ligation step.

[0192] DNA ligation is described herein. Typically the DNA ligation is performed for 5 to 30 minutes, such as about 10 minutes.

[0193] The protein in the sample may be digested enzymatically, for example using a proteinase, optionally Proteinase K. The protein may be enzymatically digested for a period of about 30 minutes to 1 hour, for example for about 45 minutes. In one aspect after digestion of the protein, for example Proteinase K digestion, there is no cross-link reversal or phenol DNA extraction step.

[0194] In one aspect PCR detection is capable of detecting a single copy of the ligated nucleic acid, preferably with a binary read-out for presence/absence of the ligated nucleic acid.

[0195] FIG. 1 shows a preferred process of detecting chromosome interactions.

### Processes and Uses of the Invention

[0196] The process of the invention can be described in different ways. It can be described as a process of making a ligated nucleic acid comprising (i) in vitro cross-linking of chromosome regions which have come together in a chromosome interaction; (ii) subjecting said cross-linked DNA to cutting or restriction digestion cleavage; and (iii) ligating said cross-linked cleaved DNA ends to form a ligated nucleic acid, wherein detection of the ligated nucleic acid may be used to determine the chromosome state at a locus, and wherein preferably:
[0197] the locus may be any of the loci or regions mentioned in Table 1, 3, 8 or 10 and/or
[0198] wherein the chromosomal interaction may be any of the chromosome interactions mentioned herein or corresponding to any of the probes disclosed in Table 1, 3, 8 or 10 and/or
[0199] wherein the ligated product may have or comprise (i) sequence which is the same as or homologous to any of the probe sequences disclosed in Table 1, 3, 8 or 10; or (ii) sequence which is complementary to (ii).

[0200] The process of the invention can be described as a process for detecting chromosome states which represent different subgroups in a population comprising determining whether a chromosome interaction is present or absent within a defined epigenetically active region of the genome, wherein preferably:
[0201] the subgroup is defined by prognosis for coronavirus infection, and/or
[0202] the chromosome state may be at any locus or region mentioned in Table 1 or 3; and/or
[0203] the chromosome interaction may be any of those mentioned in Table 1 or 3, or corresponding to any of the probes disclosed in those tables.

[0204] One or more of the markers of Table 7 may be used in these aspects of the invention, for example 3, 4, 5 or all of the markers of Table 7.

[0205] Further one or more of the markers of Table 8, 9, 10, 11, 12, 13, 14, 15, 16 or 17 may be used in these aspects of the invention, including specific numbers or combinations or markers from any of these tables as disclosed herein.

### Homologues

[0206] Homologues of polynucleotide/nucleic acid (e.g. DNA) sequences are referred to herein. Such homologues typically have at least 70% homology, preferably at least 80%, at least 85%, at least 90%, at least 95%, at least 97%, at least 98% or at least 99% homology, for example over a region of at least 10, 15, 20, 30, 100 or more contiguous nucleotides, or across the portion of the nucleic acid which is from the region of the chromosome involved in the chromosome interaction. The homology may be calculated on the basis of nucleotide identity (sometimes referred to as “hard homology”).

[0207] Therefore, in a particular aspect, homologues of polynucleotide/nucleic acid (e.g. DNA) sequences are referred to herein by reference to percentage sequence identity. Typically such homologues have at least 70% sequence identity, preferably at least 80%, at least 85%, at least 90%, at least 95%, at least 97%, at least 98% or at least 99% sequence identity, for example over a region of at least 10, 15, 20, 30, 100 or more contiguous nucleotides, or across the portion of the nucleic acid which is from the region of the chromosome involved in the chromosome interaction. The homologues may have at least 70% sequence identity, preferably at least 80%, at least 85%, at least 90%, at least 95%, at least 97%, at least 98% or at least 99% sequence identity across the entire probe, primer or primer pair.

[0208] For example the UWGCG Package provides the BESTFIT program which can be used to calculate homology and/or % sequence identity (for example used on its default settings) (Devereux et al (1984) Nucleic Acids Research 12, p 387-395). The PILEUP and BLAST algorithms can be used to calculate homology and/or % sequence identity and/or line up sequences (such as identifying equivalent or corresponding sequences (typically on their default settings)), for example as described in Altschul S. F. (1993) J Mol Evol 36:290-300; Altschul, S, F et al (1990) J Mol Biol 215:403-10.

[0209] Software for performing BLAST analyses is publicly available through the National Center for Biotechnology Information. This algorithm involves first identifying high scoring sequence pair (HSPs) by identifying short words of length W in the query sequence that either match or satisfy some positive-valued threshold score T when aligned with a word of the same length in a database sequence. T is referred to as the neighbourhood word score threshold (Altschul et al, supra). These initial neighbourhood word hits act as seeds for initiating searches to find HSPs containing them. The word hits are extended in both directions along each sequence for as far as the cumulative alignment score can be increased. Extensions for the word hits in each direction are halted when: the cumulative alignment score falls off by the quantity X from its maximum achieved value; the cumulative score goes to zero or below, due to the accumulation of one or more negative-scoring residue alignments; or the end of either sequence is reached. The BLAST algorithm parameters W5 T and X determine the sensitivity and speed of the alignment. The BLAST program uses as defaults a word length (W) of 11, the BLOSUM62 scoring matrix (see Henikoff and Henikoff (1992) Proc. Natl. Acad. Sci. USA 89:10915-10919) alignments (B) of 50, expectation (E) of 10, M=5, N=4, and a comparison of both strands.

[0210] The BLAST algorithm performs a statistical analysis of the similarity between two sequences; see e.g., Karlin and Altschul (1993) Proc. Natl. Acad. Sci. USA 90:5873-5787. One measure of similarity provided by the BLAST algorithm is the smallest sum probability (P (N)), which provides an indication of the probability by which a match between two polynucleotide sequences would occur by chance. For example, a sequence is considered similar to another sequence if the smallest sum probability in comparison of the first sequence to the second sequence is less than about 1, preferably less than about 0.1, more preferably less than about 0.01, and most preferably less than about 0.001.

[0211] The homologous sequence typically differs by 1, 2, 3, 4 or more bases, such as less than 10, 15 or 20 bases (which may be substitutions, deletions or insertions of nucleotides). These changes may be measured across any of the regions mentioned above in relation to calculating homology and/or % percentage sequence identity.

[0212] Homology of a ‘pair of primers’ can be calculated, for example, by considering the two sequences as a single sequence (as if the two sequences are joined together) for the purpose of then comparing against the another primer pair which again is considered as a single sequence.

### EpiSwitch™ Technology

[0213] The EpiSwitch™ Technology also relates to the use of microarray EpiSwitch™ marker data in the detection of epigenetic chromosome conformation signatures specific for phenotypes. Aspects such as EpiSwitch™ which utilise ligated nucleic acids in the manner described herein have several advantages. They have a low level of stochastic noise, for example because the nucleic acid sequences from the first set of nucleic acids of the present invention either hybridise or fail to hybridise with the second set of nucleic acids. This provides a binary result permitting a relatively simple way to measure a complex mechanism at the epigenetic level. EpiSwitch™ technology also has fast processing time and low cost. In one aspect the processing time is 3 hours to 6 hours.

### Arrays

[0214] All nucleic acids disclosed herein may be bound to an array, and in one aspect there are at least 15,000, 45,000, 100,000 or 250,000 different nucleic acids bound to the array, which preferably represent at least 300, 900, 2000 or 5000 loci. In one aspect one, or more, or all of the different populations of nucleic acids are bound to more than one distinct region of the array, in effect repeated on the array allowing for error detection. The array may be based on an Agilent SurePrint G3 Custom CGH microarray platform. Detection of binding of first nucleic acids to the array may be performed by a dual colour system.

### The Threshold of Detection

[0215] The markers which are disclosed herein have been found to be ‘disseminating markers’ capable of determining coronavirus infection status or subgroup. In practical terms it means that these markers are prevalent across groups of patients when compared to controls (as is shown by the FC value, for example). On average, as an example, an individual marker may typically be present in 80% of patients tested and in 10% of controls tested. Thus in one aspect of the method an individual is deemed to be part of the relevant coronavirus prognosis subgroup if least 80% of the markers that are tested for that subgroup are present in the individual and/or if at least 80% of the markers that are tested which are related to the control are absent from the individual.

### Therapeutic Agents and Treatments

[0216] This section is relevant both to:
[0217] therapeutic agents which are given to individuals selected by the process of the invention, and
[0218] therapeutic agents which are selected based on the results of the process of the invention.

[0219] The invention provides therapeutic agents for use in preventing or treating coronavirus infection or related sub-condition in certain individuals, for example those identified by a process of the invention. This may comprise administering to an individual in need a therapeutically effective amount of the agent. The invention provides use of the agent in the manufacture of a medicament to prevent or treat a condition in certain individuals. The disease or condition may be coronavirus infection, any type of coronavirus infection sub-condition, such as severe disease, or a stage of coronavirus infection.

[0220] The formulation of the agent will depend upon the nature of the agent. The agent will be provided in the form of a pharmaceutical composition containing the agent and a pharmaceutically acceptable carrier or diluent. Suitable carriers and diluents include isotonic saline solutions, for example phosphate-buffered saline. Typical oral dosage compositions include tablets, capsules, liquid solutions and liquid suspensions. The agent may be formulated for parenteral, intravenous, intramuscular, subcutaneous, transdermal or oral administration.

[0221] The dose of an agent may be determined according to various parameters, especially according to the substance used; the age, weight and condition of the individual to be treated; the route of administration; and the required regimen. A physician will be able to determine the required route of administration and dosage for any particular agent. A suitable dose may however be from 0.1 to 100 mg/kg body weight such as 1 to 40 mg/kg body weight, for example, to be taken from 1 to 3 times daily.

[0222] The therapeutic agent may be any such agent disclosed herein, or may target any ‘target’ disclosed herein, including any protein or gene disclosed herein in any table. It is understood that any agent that is disclosed in a combination should be seen as also disclosed for administration individually.

[0223] Therapeutic agents and treatments which can be used in the invention include the following:

### Antivirals

[0224] Remdesivir-reduces lung virus and lung damage.
[0225] Lopinavir, ritonavir or a lopinavir/ritonavir combination-reduces lung virus and lung damage.
[0226] Umifenovir-inhibits viral entry into target cells and stimulate immune response.
   Immune modulators
[0227] Dexamethasone—for dampening down the body's immune system.
[0228] Convalescent plasma—contains high levels of polyclonal, pathogen specific antibodies. These antibodies may confer passive immunity to recipients.

[0229] The individual may be treated with any therapeutic agent selected from Table 6, and preferably Abatacept, Afelimomab, Angiotensin II, dexamethasone, Imatinib, immunoglobulin, Infliximab, Nintedanib, Rituximab or Ulixertinib.

[0230] Individuals identified as having prognosis for severe disease:
[0231] can be treated for hyperinflammation
[0232] can be given specialized treatment under close observation
[0233] can be treated with agents to reduce viral load
[0234] can be given immunomodulators
[0235] can be given a vaccine
[0236] can be given prophylactic treatment
[0237] can be provided with quarantine isolation
[0238] can be given therapeutic agents which prevent or treat sepsis.

### Further Therapy Embodiments

[0239] The invention provides therapy of individual to prevent or treat any prognosis mentioned herein (including prognosis to severe coronavirus disease), such as any type of individual mentioned herein (including defined by risk factors, disease, susceptibility or any other characteristic mentioned herein). The individual may have been identified as being susceptible to severe coronavirus disease. Preferably the invention provides therapy to prevent or treat severe coronavirus disease, optionally in an individual who has been identified as being susceptible of to such disease. The individual may be given any therapy mentioned herein, including the any of the agents listed in Table 6.

[0240] The invention provides a therapeutic agent selected from any of the agents shown in Table 6 for use in a method of treatment of severe coronavirus disease, said method comprising:
[0241] identifying whether an individual is susceptible to severe coronavirus disease by the process of the invention (i.e. by typing chromosome interactions in the individual), and
[0242] administering to any individual identified as being susceptible said agent.

[0243] The invention provides a method of treatment comprising identifying whether an individual is susceptible to severe coronavirus disease by the typing method of the invention and administering to any individual identified as being susceptible any agent listed in Table 6.

[0244] Preferred agents from Table 6 include Abatacept, Afelimomab, Angiotensin II, dexamethasone, Imatinib, immunoglobulin, Infliximab, Nintedanib, Rituximab and Ulixertinib.

[0245] The invention provides an agent which:
[0246] prevents or treats coronavirus infection, and/or
[0247] prevents or treats a detrimental immune response;
   for use in treating an individual that has been identified as being susceptible to severe disease as a result of coronavirus infection according to the method of the invention.

### Personalised Therapy

[0248] The invention provides different types of personalised treatment. In one aspect an individual is given or not given therapy based on the results of the method of the invention, i.e. based on the detecting of the presence or absence one or more specific chromosome interactions. The method of the invention is in this sense typically allowing selection of a therapy based on the individual's prognosis or responsiveness to the therapy.

[0249] In one aspect the invention provides a method of treatment of an individual comprising:
[0250] (i) detecting the presence or absence of one or more chromosome interactions represented by the probes shown in Table 1 or 3,
[0251] (ii) administering to the individual a therapeutic agent which is selected based on the presence or absence of said chromosome interactions in the individual.

[0252] In one aspect a therapeutic agent is selected which targets a particular gene or gene product (for example the expressed protein) where the gene is one in which the chromosome interaction is associated with or present within.

[0253] In the personalised therapy aspects of the invention any specific chromosome interaction can be typed which is mentioned herein, for example in any table. Any number or combination of interactions disclosed herein can be typed. One or more of the markers of Table 7 may be used in these aspects of the invention, for example 3, 4, 5 or all of the markers of Table 7. Further one or more of the markers of Table 8, 9, 10, 11, 12, 13, 14, 15, 16 or 17 may be used in these aspects of the invention, including specific numbers or combinations or markers from any of these tables as disclosed herein.

### Screening for Therapeutic Agents

[0254] The invention provides a method of screening candidate agents (for example compounds) to determine whether they can be used for therapy of any condition mentioned herein, including susceptibility to severe coronavirus disease, preferably to severe Covid-19 disease.

[0255] In one aspect the invention provides a method of determining whether a candidate agent is therapeutic for severe coronavirus disease comprising determining whether the candidate is able to alter one or more chromosome interactions disclosed herein, including the numbers and combinations of chromosome interaction disclosed herein, for example as represented by the probes shown in Table 1 or 3. This method may determine whether the candidate agent is able create or destroy such interaction(s).

[0256] In one aspect the invention provides a method for determining whether a candidate agent can be used to prevent or treat severe coronavirus disease comprising;
[0257] (i) contacting the candidate agent with one or more chromosomes,
[0258] (ii) determining whether the candidate agent is able to create or destroy one or more chromosome interactions represented by the probes shown in Table 1 or 3 on said chromosomes,
[0259] to thereby determine whether the candidate agent can be used to prevent or treat severe coronavirus disease.

[0260] One or more of the markers of Table 7 may be used in these aspects of the invention, for example 3, 4, 5 or all of the markers of Table 7. Further one or more of the markers of Table 8, 9, 10, 11, 12, 13, 14, 15, 16 or 17 may be used in these aspects of the invention, including specific numbers or combinations or markers from any of these tables as disclosed herein.

### Properties of Nucleic Acids of the Invention

[0261] The invention relates to certain nucleic acids, such as the ligated nucleic acids which are described herein as being used or generated in the process of the invention. These may be the same as, or have any of the properties of, the first and second nucleic acids mentioned herein. The nucleic acids of the invention typically comprise two portions each comprising sequence from one of the two regions of the chromosome which come together in the chromosome interaction. Typically each portion is at least 8, 10, 15, 20, 30 or 40 nucleotides in length, for example 10 to 40 nucleotides in length. Preferred nucleic acids comprise sequence from any of the genes mentioned in any of the tables. Typically preferred nucleic acids comprise the specific probe sequences mentioned in Table 1 or 3; or fragments and/or homologues of such sequences.

[0262] Preferably the nucleic acids are DNA. It is understood that where a specific sequence is provided the invention may use the complementary sequence as required in the particular aspect. Preferably the nucleic acids are DNA. It is understood that where a specific sequence is provided the invention may use the complementary sequence as required in the particular aspect.

[0263] The primers shown in Table 1 or 3 may also be used in the invention as mentioned herein. In one aspect primers are used which comprise any of: the sequences shown in Table 1 or 3; or fragments and/or homologues of any sequence shown in Table 1 or 3.

[0264] One or more of the probes or primer pairs of Table 7 may be used in these aspects of the invention, for example 3, 4, 5 or all of probes or primer pairs of Table 7. Further one or more of the probes or primers of any of Table 8, 9, 10, 11, 12, 13, 14, 15, 16 or 17 may be used in these aspects of the invention.

### Screening to Identify Relevant Chromosome Interactions

[0265] In one aspect one or more of the chromosome interactions which are typed have been identified by a process of determining which chromosomal interactions are relevant to a chromosome state corresponding to a coronavirus infection subgroup of the population, comprising contacting a first set of nucleic acids from subgroups with different states of the chromosome with a second set of index nucleic acids, and allowing complementary sequences to hybridise, wherein the nucleic acids in the first and second sets of nucleic acids represent a ligated product comprising sequences from both the chromosome regions that have come together in chromosomal interactions, and wherein the pattern of hybridisation between the first and second set of nucleic acids allows a determination of which chromosomal interactions are specific to the subgroup.

[0266] The second set of nucleic acid sequences has the function of being a set of index sequences, and is essentially a set of nucleic acid sequences which are suitable for identifying subgroup specific sequence. They can represents the ‘background’ chromosomal interactions and might be selected in some way or be unselected. They are in general a subset of all possible chromosomal interactions.

[0267] The second set of nucleic acids may be derived by any suitable process. They can be derived computationally or they may be based on chromosome interaction in individuals. They typically represent a larger population group than the first set of nucleic acids. In one particular aspect, the second set of nucleic acids represents all possible epigenetic chromosomal interactions in a specific set of genes. In another particular aspect, the second set of nucleic acids represents a large proportion of all possible epigenetic chromosomal interactions present in a population described herein. In one particular aspect, the second set of nucleic acids represents at least 50% or at least 80% of epigenetic chromosomal interactions in at least 20, 50, 100 or 500 genes, for example in 20 to 100 or 50 to 500 genes.

[0268] The second set of nucleic acids typically represents at least 100 possible epigenetic chromosome interactions which modify, regulate or in any way mediate a phenotype in population. The second set of nucleic acids may represent chromosome interactions that affect a disease state (typically relevant to diagnosis or prognosis) in a species. The second set of nucleic acids typically comprises sequences representing epigenetic interactions both relevant and not relevant to a prognosis subgroup.

[0269] In one particular aspect the second set of nucleic acids derive at least partially from naturally occurring sequences in a population, and are typically obtained by in silico processes. Said nucleic acids may further comprise single or multiple mutations in comparison to a corresponding portion of nucleic acids present in the naturally occurring nucleic acids. Mutations include deletions, substitutions and/or additions of one or more nucleotide base pairs. In one particular aspect, the second set of nucleic acids may comprise sequence representing a homologue and/or orthologue with at least 70% sequence identity to the corresponding portion of nucleic acids present in the naturally occurring species. In another particular aspect, at least 80% sequence identity or at least 90% sequence identity to the corresponding portion of nucleic acids present in the naturally occurring species is provided.

### Properties of the Second Set of Nucleic Acids

[0270] In one particular aspect, there are at least 100 different nucleic acid sequences in the second set of nucleic acids, preferably at least 1000, 2000 or 5000 different nucleic acids sequences, with up to 100,000, 1,000,000 or 10,000,000 different nucleic acid sequences. A typical number would be 100 to 1,000,000, such as 1,000 to 100,000 different nucleic acids sequences. All or at least 90% or at least 50% or these would correspond to different chromosomal interactions.

[0271] In one particular aspect, the second set of nucleic acids represent chromosome interactions in at least 20 different loci or genes, preferably at least 40 different loci or genes, and more preferably at least 100, at least 500, at least 1000 or at least 5000 different loci or genes, such as 100 to 10,000 different loci or genes. The lengths of the second set of nucleic acids are suitable for them to specifically hybridise according to Watson Crick base pairing to the first set of nucleic acids to allow identification of chromosome interactions specific to subgroups. Typically the second set of nucleic acids will comprise two portions corresponding in sequence to the two chromosome regions which come together in the chromosome interaction. The second set of nucleic acids typically comprise nucleic acid sequences which are at least 10, preferably 20, and preferably still 30 bases (nucleotides) in length. In another aspect, the nucleic acid sequences may be at the most 500, preferably at most 100, and preferably still at most 50 base pairs in length. In a preferred aspect, the second set of nucleic acids comprises nucleic acid sequences of between 17 and 25 base pairs. In one aspect at least 100, 80% or 50% of the second set of nucleic acid sequences have lengths as described above. Preferably the different nucleic acids do not have any overlapping sequences, for example at least 100%, 90%, 80% or 50% of the nucleic acids do not have the same sequence over at least 5 contiguous nucleotides.

[0272] Given that the second set of nucleic acids acts as an ‘index’ then the same set of second nucleic acids may be used with different sets of first nucleic acids which represent subgroups for different characteristics, i.e. the second set of nucleic acids may represent a ‘universal’ collection of nucleic acids which can be used to identify chromosome interactions relevant to different characteristics.

### The First Set of Nucleic Acids (Screening for Relevant Chromosome Interactions)

[0273] The first set of nucleic acids are typically from subgroups relevant to coronavirus infection. The first nucleic acids may have any of the characteristics and properties of the second set of nucleic acids mentioned herein. The first set of nucleic acids is normally derived from samples from the individuals which have undergone treatment and processing as described herein, particularly the EpiSwitch™ cross-linking and cleaving steps. Typically the first set of nucleic acids represents all or at least 80% or 50% of the chromosome interactions present in the samples taken from the individuals.

[0274] Typically, the first set of nucleic acids represents a smaller population of chromosome interactions across the loci or genes represented by the second set of nucleic acids in comparison to the chromosome interactions represented by second set of nucleic acids, i.e. the second set of nucleic acids is representing a background or index set of interactions in a defined set of loci or genes.

### Library of Nucleic Acids

[0275] Any of the types of nucleic acid populations mentioned herein may be present in the form of a library comprising at least 200, at least 500, at least 1000, at least 5000 or at least 10000 different nucleic acids of that type, such as ‘first’ or ‘second’ nucleic acids. Such a library may be in the form of being bound to an array. The library may comprise some or all of the probes or primer pairs shown in any table disclosed herein. The library may comprise all of the probe sequence from any of the tables disclosed herein.

### Hybridisation

[0276] The invention typically requires a means for allowing wholly or partially complementary nucleic acid sequences to hybridise, for example in the method of the invention or between the first set of nucleic acids and the second set of nucleic acids to hybridise. In one aspect all of the first set of nucleic acids is contacted with all of the second set of nucleic acids in a single assay, i.e. in a single hybridisation step. However any suitable assay can be used.

### Labelled Nucleic Acids and Pattern of Hybridisation

[0277] The nucleic acids mentioned herein may be labelled, preferably using an independent label such as a fluorophore (fluorescent molecule) or radioactive label which assists detection of successful hybridisation. Certain labels can be detected under UV light. The pattern of hybridisation, for example on an array described herein, represents differences in epigenetic chromosome interactions between the two subgroups, and thus provides a process of comparing epigenetic chromosome interactions and determination of which epigenetic chromosome interactions are specific to a subgroup in the population of the present invention.

[0278] The term ‘pattern of hybridisation’ broadly covers the presence and absence of hybridisation, for example between the first and second set of nucleic acids, i.e. which specific nucleic acids from the first set hybridise to which specific nucleic acids from the second set, and so it not limited to any particular assay or technique, or the need to have a surface or array on which a ‘pattern’ can be detected.

### Forms of the Substance Mentioned Herein

[0279] Any of the substances, such as nucleic acids or therapeutic agents, mentioned herein may be in purified or isolated form. They may be in a form which is different from that found in nature, for example they may be present in combination with other substance with which they do not occur in nature. The nucleic acids (including portions of sequences defined herein) may have sequences which are different to those found in nature, for example having at least 1, 2, 3, 4 or more nucleotide changes in the sequence as described in the section on homology. The nucleic acids may have heterologous sequence at the 5′ or 3′ end. The nucleic acids may be chemically different from those found in nature, for example they may be modified in some way, but preferably are still capable of Watson-Crick base pairing. Where appropriate the nucleic acids will be provided in double stranded or single stranded form. The invention provides all of the specific nucleic acid sequences mentioned herein in single or double stranded form, and thus includes the complementary strand to any sequence which is disclosed.

[0280] The invention provides a kit for carrying out any process of the invention, including detection of a chromosomal interaction relating to prognosis. Such a kit can include a specific binding agent capable of detecting the relevant chromosomal interaction, such as agents capable of detecting a ligated nucleic acid generated by processes of the invention. Preferred agents present in the kit include probes capable of hybridising to the ligated nucleic acid or primer pairs, for example as described herein, capable of amplifying the ligated nucleic acid in a PCR reaction.

[0281] The invention provides a device that is capable of detecting the relevant chromosome interactions. The device preferably comprises any specific binding agents, probe or primer pair capable of detecting the chromosome interaction, such as any such agent, probe or primer pair described herein.

### Detection Process

[0282] In one aspect quantitative detection of the ligated sequence which is relevant to a chromosome interaction is carried out using a probe which is detectable upon activation during a PCR reaction, wherein said ligated sequence comprises sequences from two chromosome regions that come together in an epigenetic chromosome interaction, wherein said process comprises contacting the ligated sequence with the probe during a PCR reaction, and detecting the extent of activation of the probe, and wherein said probe binds the ligation site. The process typically allows particular interactions to be detected in a MIQE compliant manner using a dual labelled fluorescent hydrolysis probe.

[0283] The probe is generally labelled with a detectable label which has an inactive and active state, so that it is only detected when activated. The extent of activation will be related to the extent of template (ligation product) present in the PCR reaction. Detection may be carried out during all or some of the PCR, for example for at least 50% or 80% of the cycles of the PCR.

[0284] The probe can comprise a fluorophore covalently attached to one end of the oligonucleotide, and a quencher attached to the other end of the nucleotide, so that the fluorescence of the fluorophore is quenched by the quencher. In one aspect the fluorophore is attached to the 5′end of the oligonucleotide, and the quencher is covalently attached to the 3′ end of the oligonucleotide.

[0285] Fluorophores that can be used in the process of the invention include FAM, TET, JOE, Yakima Yellow, HEX, Cyanine3, ATTO 550, TAMRA, ROX, Texas Red, Cyanine 3.5, LC610, LC 640, ATTO 647N, Cyanine 5, Cyanine 5.5 and ATTO 680. Quenchers that can be used with the appropriate fluorophore include TAM, BHQ1, DAB, Eclip, BHQ2 and BBQ650, optionally wherein said fluorophore is selected from HEX, Texas Red and FAM. Preferred combinations of fluorophore and quencher include FAM with BHQ1 and Texas Red with BHQ2.

Use of the Probe in a qPCR Assay

[0286] Hydrolysis probes of the invention are typically temperature gradient optimised with concentration matched negative controls. Preferably single-step PCR reactions are optimized. More preferably a standard curve is calculated. An advantage of using a specific probe that binds across the junction of the ligated sequence is that specificity for the ligated sequence can be achieved without using a nested PCR approach. The processes described herein allow accurate and precise quantification of low copy number targets. The target ligated sequence can be purified, for example gel-purified, prior to temperature gradient optimization. The target ligated sequence can be sequenced. Preferably PCR reactions are performed using about 10 ng, or 5 to 15 ng, or 10 to 20 ng, or 10 to 50 ng, or 10 to 200 ng template DNA. Forward and reverse primers are designed such that one primer binds to the sequence of one of the chromosome regions represented in the ligated DNA sequence, and the other primer binds to other chromosome region represented in the ligated DNA sequence, for example, by being complementary to the sequence.

[0287] Detection of the ligated nucleic acid may use any probe and/or primer pair disclosed herein in any table. In one aspect a qPCR system is used which used the probes and primer pairs disclosed in Table 7, for homologues of such probes and primer pairs. Preferably the probes shown in the ‘Modifications Seq’ column of Table 7 are used with the types of quencher and reporter shown.

### Choice of Ligated DNA Target

[0288] The invention includes selecting primers and a probe for use in a PCR process as defined herein comprising selecting primers based on their ability to bind and amplify the ligated sequence and selecting the probe sequence based properties of the target sequence to which it will bind, in particular the curvature of the target sequence.

[0289] Probes are typically designed/chosen to bind to ligated sequences which are juxtaposed restriction fragments spanning the restriction site. In one aspect of the invention, the predicted curvature of possible ligated sequences relevant to a particular chromosome interaction is calculated, for example using a specific algorithm referenced herein. The curvature can be expressed as degrees per helical turn, e.g. 10.5° per helical turn. Ligated sequences are selected for targeting where the ligated sequence has a curvature propensity peak score of at least 5° per helical turn, typically at least 10°, 15° or 20° per helical turn, for example 5° to 20° per helical turn. Preferably the curvature propensity score per helical turn is calculated for at least 20, 50, 100, 200 or 400 bases, such as for 20 to 400 bases upstream and/or downstream of the ligation site. Thus in one aspect the target sequence in the ligated product has any of these levels of curvature. Target sequences can also be chosen based on lowest thermodynamic structure free energy.

### Particular Aspects

[0290] In one aspect only intrachromosomal interactions are typed/detected, and no extrachromosomal interactions (between different chromosomes) are typed/detected.

[0291] In particular aspects certain chromosome interactions are not typed, for example any specific interaction mentioned herein (for example as defined by any probe or primer pair mentioned herein). In some aspects chromosome interactions are not typed in any of the genes relevant to chromosome interactions mentioned herein.

[0292] The data provided herein shows that the markers are ‘disseminating’ ones able to differentiate cases and non-cases for the relevant disease situation, for example prognosis. Therefore when carrying out the invention the skilled person will be able to determine by detection of the interactions which subgroup the individual is in. In one embodiment a threshold value of detection of at least 70% of the tested markers in the form they are associated with the relevant disease situation (either by absence or presence) may be used to determine whether the individual is in the relevant subgroup.

### Screening Process

[0293] The invention provides a process of determining which chromosomal interactions are relevant to a chromosome state corresponding to an prognosis subgroup of the population, comprising contacting a first set of nucleic acids from subgroups with different states of the chromosome with a second set of index nucleic acids, and allowing complementary sequences to hybridise, wherein the nucleic acids in the first and second sets of nucleic acids represent a ligated product comprising sequences from both the chromosome regions that have come together in chromosomal interactions, and wherein the pattern of hybridisation between the first and second set of nucleic acids allows a determination of which chromosomal interactions are specific to an prognosis subgroup. The subgroup may be any of the specific subgroups defined herein, for example with reference to particular conditions or therapies.

### Disclosure in Publications and Priority Applications

[0294] The contents of all publications mentioned herein are incorporated by reference into the present specification and may be used to further define the features relevant to the invention. The contents of all priority applications are incorporated into the present specification and may be used to define the features relevant to the invention.

### Techniques Used to Identify the Specific Relevant Chromosome Interactions

[0295] The EpiSwitch™ platform technology detects epigenetic regulatory signatures of regulatory changes between normal and abnormal conditions at loci. The EpiSwitch™ platform identifies and monitors the fundamental epigenetic level of gene regulation associated with regulatory high order structures of human chromosomes also known as chromosome conformation signatures. Chromosome signatures are a distinct primary step in a cascade of gene deregulation. They are high order biomarkers with a unique set of advantages against biomarker platforms that utilize late epigenetic and gene expression biomarkers, such as DNA methylation and RNA profiling.

### EpiSwitch™ Array Assay

[0296] The custom EpiSwitch™ array-screening platforms come in 4 densities of, 15K, 45K, 100K, and 250K unique chromosome conformations, each chimeric fragment is repeated on the arrays 4 times, making the effective densities 60K, 180K, 400K and 1 million respectively.

### Custom Designed EpiSwitch™ Arrays

[0297] The 15K EpiSwitch™ array can screen the whole genome including around 300 loci interrogated with the EpiSwitch™ Biomarker discovery technology. The EpiSwitch™ array is built on the Agilent SurePrint G3 Custom CGH microarray platform; this technology offers 4 densities, 60K, 180K, 400K and 1 Million probes. The density per array is reduced to 15K, 45K, 100K and 250K as each EpiSwitch™ probe is presented as a quadruplicate, thus allowing for statistical evaluation of the reproducibility. The average number of potential EpiSwitch™ markers interrogated per genetic loci is 50, as such the numbers of loci that can be investigated are 300, 900, 2000, and 5000.

### EpiSwitch™ Custom Array Pipeline

[0298] The EpiSwitch™ array is a dual colour system with one set of samples, after EpiSwitch™ library generation, labelled in Cy5 and the other of sample (controls) to be compared/analyzed labelled in Cy3. The arrays are scanned using the Agilent SureScan Scanner and the resultant features extracted using the Agilent Feature Extraction software. The data is then processed using the EpiSwitch™ array processing scripts in R. The arrays are processed using standard dual colour packages in Bioconductor in R: Limma*. The normalisation of the arrays is done using the normalisedWithinArrays function in Limma* and this is done to the on chip Agilent positive controls and EpiSwitch™ positive controls. The data is filtered based on the Agilent Flag calls, the Agilent control probes are removed and the technical replicate probes are averaged, in order for them to be analysed using Limma*. The probes are modelled based on their difference between the 2 scenarios being compared and then corrected by using False Discovery Rate. Probes with Coefficient of Variation (CV)<=30% that are <=−1.1 or =>1.1 and pass the p<=0.1 FDR p-value are used for further screening. To reduce the probe set further Multiple Factor Analysis is performed using the FactorMineR package in R. * Note: LIMMA is Linear Models and Empirical Bayes Processes for Assessing Differential Expression in Microarray Experiments. Limma is an R package for the analysis of gene expression data arising from microarray or RNA-Seq.

[0299] The pool of probes is initially selected based on adjusted p-value, FC and CV<30% (arbitrary cut off point) parameters for final picking. Further analyses and the final list are drawn based only on the first two parameters (adj. p-value; FC).

### Statistical Pipeline

[0300] EpiSwitch™ screening arrays are processed using the EpiSwitch™ Analytical Package in R in order to select high value EpiSwitch™ markers for translation on to the EpiSwitch™ PCR platform.

### Step 1

[0301] Probes are selected based on their corrected p-value (False Discovery Rate, FDR), which is the product of a modified linear regression model. Probes below p-value <=0.1 are selected and then further reduced by their Epigenetic ratio (ER), probes ER have to be <=−1.1 or =>1.1 in order to be selected for further analysis. The last filter is a coefficient of variation (CV), probes have to be below <=0.3.

### Step 2

[0302] The top 40 markers from the statistical lists are selected based on their ER for selection as markers for PCR translation. The top 20 markers with the highest negative ER load and the top 20 markers with the highest positive ER load form the list.

### Step 3

[0303] The resultant markers from step 1, the statistically significant probes form the bases of enrichment analysis using hypergeometric enrichment (HE). This analysis enables marker reduction from the significant probe list, and along with the markers from step 2 forms the list of probes translated on to the EpiSwitch™ PCR platform.

[0304] The statistical probes are processed by HE to determine which genetic locations have an enrichment of statistically significant probes, indicating which genetic locations are hubs of epigenetic difference.

[0305] The most significant enriched loci based on a corrected p-value are selected for probe list generation. Genetic locations below p-value of 0.3 or 0.2 are selected. The statistical probes mapping to these genetic locations, with the markers from step 2, form the high value markers for EpiSwitch™ PCR translation.

### Array Design and Processing

### Array Design

[0306] Genetic loci are processed using the SII software (currently v3.2) to:
[0307] Pull out the sequence of the genome at these specific genetic loci (gene sequence with 50 kb upstream and 20 kb downstream)
[0308] Define the probability that a sequence within this region is involved in CCs
[0309] Cut the sequence using a specific RE
[0310] Determine which restriction fragments are likely to interact in a certain orientation
[0311] Rank the likelihood of different CCs interacting together.
[0312] Determine array size and therefore number of probe positions available (x)
[0313] Pull out x/4 interactions.
[0314] For each interaction define sequence of 30 bp to restriction site from part 1 and 30 bp to restriction site of part 2. Check those regions are not repeats, if so exclude and take next interaction down on the list. Join both 30 bp to define probe.
[0315] Create list of x/4 probes plus defined control probes and replicate 4 times to create list to be created on array
[0316] Upload list of probes onto Agilent Sure design website for custom CGH array.
[0317] Use probe group to design Agilent custom CGH array.

### Array Processing

[0318] Process samples using EpiSwitch™ Standard Operating Procedure (SOP) for template production.
[0319] Clean up with ethanol precipitation by array processing laboratory.
[0320] Process samples as per Agilent SureTag complete DNA labelling kit-Agilent Oligonucleotide Array-based CGH for Genomic DNA Analysis Enzymatic labelling for Blood, Cells or Tissues
[0321] Scan using Agilent C Scanner using Agilent feature extraction software.

[0322] EpiSwitch™ biomarker signatures demonstrate high robustness, sensitivity and specificity in the stratification of complex disease phenotypes. This technology takes advantage of the latest breakthroughs in the science of epigenetics, monitoring and evaluation of chromosome conformation signatures as a highly informative class of epigenetic biomarkers. Current research methods deployed in academic environment require from 3 to 7 days for biochemical processing of cellular material in order to detect CCSs. Those procedures have limited sensitivity, and reproducibility; and furthermore, do not have the benefit of the targeted insight provided by the EpiSwitch™ Analytical Package at the design stage.

### EpiSwitch™ Array in Silico Marker Identification

[0323] CCS sites across the genome are directly evaluated by the EpiSwitch™ Array on clinical samples from testing cohorts for identification of all relevant stratifying lead biomarkers. The EpiSwitch™ Array platform is used for marker identification due to its high-throughput capacity, and its ability to screen large numbers of loci rapidly. The array used was the Agilent custom-CGH array, which allows markers identified through the in silico software to be interrogated.

### EpiSwitch™ PCR

[0324] Potential markers identified by EpiSwitch™ Array are then validated either by EpiSwitch™ PCR or DNA sequencers (i.e. Roche 454, Nanopore MinION, etc.). The top PCR markers which are statistically significant and display the best reproducibility are selected for further reduction into the final EpiSwitch™ Signature Set, and validated on an independent cohort of samples. EpiSwitch™ PCR can be performed by a trained technician following a standardised operating procedure protocol established. All protocols and manufacture of reagents are performed under ISO 13485 and 9001 accreditation to ensure the quality of the work and the ability to transfer the protocols. EpiSwitch™ PCR and EpiSwitch™ Array biomarker platforms are compatible with analysis of both whole blood and cell lines. The tests are sensitive enough to detect abnormalities in very low copy numbers using small volumes of blood.

### Use of a Classifier

[0325] The method of the invention may include analysis of the chromosome interactions identified in the individual, for example using a classifier, which may increase performance, such as sensitivity or specificity. The classifier is typically one that has been ‘trained’ on samples from the population and such training may assist the classifier to detect any prognosis (including susceptibility) mentioned herein.

[0326] The invention is illustrated by the following:

### EXAMPLE

Identification of Chromosome Interaction Markers Using the EpiSwitch™ Platform which Represent Changes in Chromosome Conformations Due to Infection with the Sars-Covid-2 Virus

[0327] Chromosome interaction markers were identified based on being the top immunogenetic markers and also on ‘pure stats’, including having other biological links to important clinical observations such as hypercalcaemia (markers around Ca homeostasis disruption, calmodulin, calcineurin, etc.).

[0328] The prognostic stratification was based on blood collections shortly after a Covid positive test, either in asymptomatic individuals, or in people just admitted to hospital. Stratification was based on outcomes of mild Covid disease, which manifests itself in hospitalized patients, who stay of the wards and respond to treatments, and severe Covid disease which we associate with patients being transferred to ICU (intensive care unit). Severe patients do not respond to treatments available on the hospital words (extra oxygen, anti-inflammatoires, etc.) and deteriorate to ICU emergency support. The stratifications provide prognosis of immune health and hyperinflammmation in individuals, when exposed to Covid infection.

[0329] The marker data is based on 80 patients from a mixture of cohorts from UK, USA and Peru, representing asymptomatic, mild and ICU severe cases. 42 samples came from Lima, Peru, collected at the time of Lima being the world hotspot for the highest number of complications and fatalities from Covid-19 (Peru has highest per capita mortality—107 per 100,000, for comparison in the US—71 per 100, 000; in Brazil—76 per 100,000). There were 11 samples from the UK and 19 from the US.

### Experimental Work

[0330] Whole blood samples were taken from patients hospitalised with confirmed COVID-19 disease (symptoms of SARS-CoV-2 infection) and split into two definitions: severe outcomes and mild outcomes. The severe outcome definition includes patient that were admitted to hospital and required more aggressive intervention in ICU care, or where this intervention would have been provided except for comorbidities. Patients that were admitted to hospital that received only oxygen treatment and or less invasive interventions on the ward (not admitted to ICU) are defined as mild.

[0331] The EpiSwitch™ Microarray platform was initially utilised to interrogate patient samples with known clinical outcomes to gain biological insight and identify a group of potential markers that can delimit between the severe and mild patient samples. The aim was to identify the most statistically significant and biologically relevant markers. This study is done on the whole genome array, with over 900,000 selected anchor sites interrogated for each of the 80 patients presented in LDA analysis in FIG. 12, all reduced to a linear score.

[0332] The top EpiSwitch™ markers were subject to primer design to identify interactions that can be successfully interrogated with Nested PCR (nPCR) in the laboratory. The top markers from the list of the successfully designed interactions were selected and used to translate the microarray markers into nPCR markers though screening of the top 150 markers on the complete sample cohort.

[0333] The work had three primary aims: to investigate Covid-19 in whole blood samples, identify the top microarray interactions and translate them into nPCR, and provide proof of concept for a Covid-19 severity whole-blood based EpiSwitch™ nPCR product.

[0334] Whole blood and PBMC often contain different cell populations, with a large proportion of the granulocytes (basophil, neutrophil and eosinophil) found in whole blood being lost during the density gradient processing to purify the PBMC fraction from whole blood (see FIG. 2). This must be borne in mind when interpreting results. The study design is shown in FIG. 3.

[0335] 42 patients were enrolled into the collection for this part of the work. A venous blood sample was taken from each subject. A volume of 5 ml or more of whole blood was be taken for EpiSwitch™ biochemical processing.

### Inclusion Criteria

[0336] Subject must be enrolled within 72 hours of presentation to the hospital

[0337] Subjects were recruited into the following two groups:
[0338] severe cases: 24 patients in ICU and/or mechanically ventilated
[0339] mild COVID-19:18 patients that are not in ICU, and also not mechanically ventilated, but just hospitalised (they can be receiving supplemental oxygen via nasal cannula).

[0340] Whole blood samples were collected in EDTA K3 blood collection tubes. The clinical annotations accompanying the samples consisted of:
[0341] demographics
[0342] Travel History
[0343] Symptoms
[0344] Date of Symptom Onset
[0345] Pre-Existing Medical Conditions
[0346] SARS-CoV-2 RT-PCR Result
[0347] Date of Specimen Collection
[0348] Other SOC Respiratory Diagnostic Result (if available)
[0349] Date of Hospitalisation
[0350] Date of Admitted to ICU (if applicable)
[0351] Information in regard to use of mechanical ventilation and duration of use
[0352] Information in regard to supplemental oxygen and duration of use

[0353] After blood sampling the EDTA tubes were inverted to mix the sample with the EDTA coating on the surface of the tubes to avoid clots. Sample were stored at −20° C. or lower, ideally within 60 minutes of collection.

### EpiSwitch Library Preparation

[0354] The 42 procured samples were processed using the EpiSwitch™ extraction protocols. The prepared libraries were quantified with Picogreen and Nanoquant (dsDNA and total nucleic acid measurements respectively). Each of the prepared EpiSwitch™ libraries were quality controlled using a standard OBD nPCR positive control assay before being stored at −80° C. until used in the subsequent steps.

[0355] After the required volume of EpiSwitch library was generated for the Microarray processing the extractions were continued to generate the required volume of library for the nPCR translation.

### Microarray Processing

[0356] The EpiSwitch™ Whole Genome Medium Density Protein Coding focussed Array was utilised using single channel analysis. The array consists of 973,335 EpiSwitch™ interactions probes and 2500 EpiSwitch™ control probes. The design focuses around protein coding and long non-coding RNA loci in the genome (GRCh38).

[0357] Each of the 42 EpiSwitch™ libraries were processed and labelled for a single channel microarray using Cy3 dye only. Each processed library was hybridised to a separate microarray. The in-line control cocktail consisting of four external DNA fragments was used to provide quality control and quantification.

### Microarray Analysis

[0358] The EpiSwitch Microarray data was analysed to identify differentially detected interactions between the two different disease phenotypes conditions. After the top markers were identified in the statistical and biological analysis the nPCR primer combinations were designed for each putative marker. Only markers that have primer combinations designed were translated to a nPCR assay. The default parameters of the Metagenome primer design were initially used to design optimal primer combinations for the markers followed by raising or lowering parameter thresholds as required.

### EpiSwitch™ Discovery Nested PCR Translation

[0359] For the top 150 markers identified from the Microarray and primer design the physical primers were ordered to allow for screening of nPCR assays that can differentiate between the severe and mild disease phenotypes. The entire 42 sample cohort was used for the nPCR translation. Each patient library was normalised to a 1 ng/ul dsDNA concentration and a serial dilution consisting of 1×, 1:2×, and 1:4× generated for assay screening.

[0360] The end point nPCR products were run on the LabChip GX Touch High throughput capillary electrophoresis machine using the 5K Chip and reagent option. Appropriate controls, including a negative human genomic control were used for each assay to ensure the products detected are actual chromosome conformation capture products and not non-specific binding of high copy number genomic DNA. The NTC was used to detect any cross contamination of reagents.

### EpiSwitch™ Discovery Nested PCR Analysis

[0361] The EpiSwitch Nested PCR platform data output was analysed with multiple statistical techniques including but not limited to Fishers Exact test, GLMNET (logistic Regression), and Bayesian logistic regression. For development of EpiSwitch™ classifiers the following statistical analysis were used:
[0362] XGBoost. A gradient boosted decision tree algorithm. An ensemble of weak decision tree models is generated and combined to produce one strong classification model.
[0363] Logistic Principal Component Analysis, optimised to use binary data.
[0364] GLMNET. Generalised linear model fitted via penalised maximum likelihood.

### Results and Treatment Implications

[0365] The markers identified in the above work are shown in Tables 1 to 4 and the Figures shows additional data and results. Separate sets of nPCR and qPCR markers were developed in parallel as shown in the tables. Selection of qPCR markers (when compared to nPCR) from the array relied on an additional filter for high abundance. In the tables, if a marker by its genomic position overlaps with immune-genetic loci (genetic marker for immune controls) it is marked as “immune” and if it coincides with cardiovascular genetic markers-“cardio”.

[0366] A prognostic test based on the identified markers is a measure of immune-health and immune competence under the exposure to Covid-19 infection. The high risk group (with a prognosis for severe disease) are likely to develop hyperinflammation and show poor response to standard of care treatment, alerting physicians to the necessity of specialized treatment under close observation: reduction of viral load and introduction of immunomodulators. Furthermore, in the context of vaccine use and distribution, the test identifies high risk groups who should be subject to vaccination. At the same time, among the general working population it could help identify high risk groups for further prophylactic treatment, protection and quarantine isolation, whilst the low risk group could be supported in returning to work.

### Identification of Gene Pathways

[0367] Chromosome interaction markers correspond to a regulatory network. Our analysis looked at how the markers corresponded to biological pathways. We obtained statistical scores showing relative overlap of significant EpiSwitch 3D genomic markers with genetic loci representing particular pathways. The higher the score the more genes from that pathway are co-localized with the sites dysregulated in the genome architecture. This showed the biological relevance of pathways, as distinct to individual genes, at the level of 3D genomics showing. The identified pathways show how the markers relate to immune health (systemic immune competence) beyond a Covid-19 model of disease.

[0368] The top pathways affected at genetic locations by 3D dysregulation include:
[0369] Innate Immune System
[0370] Toll-like Receptor Signaling Pathway
[0371] ERK Signaling
[0372] TGF-beta Signaling Pathway (WikiPathways)
[0373] Cytokine Signaling in Immune System
[0374] TCR Signaling (REACTOME)
[0375] Th17 Cell Differentiation
[0376] Class I MHC Mediated Antigen Processing and Presentation
[0377] Apoptosis Pathway
[0378] Rheumatoid Arthritis
[0379] Immune Response NFAT in Immune Response
[0380] ICos-ICosL Pathway in T-Helper Cell
[0381] Signaling By GPCR
[0382] Allograft Rejection
[0383] IL12 Signaling Mediated By STAT4
[0384] Immune Response Function of MEF2 in T Lymphocytes
[0385] CXCR4-mediated Signaling Events
[0386] Apoptotic Pathways in Synovial Fibroblasts
[0387] GPCR Pathway.

[0388] FIG. 20 shows a standard STRING network analysis that was carried out and Table 5 shows the names of the key genes in the network associated with EpiSwitch markers.

### Identified Therapies

[0389] Therapeutic compounds were identified using the sets of affected genes and gene sets associated with EpiSwitch significant markers specific for the severe disease group. Table 6 shows the list of compounds and FIG. 21 describes how to interpret this table.

### Conclusions

[0390] The present work clearly indicates that severe/ICU (critical care unit) is a separate phenotype from mild or asymptomatic patients when it comes to 3D genomic profiling with EpiSwitch markers (i.e. chromosome interaction markers). Moreover, this is seen prognostically in advance. The markers that were identified are strongly localized around genes responsible for immunity. De facto this means that through the 3D genomics of the immune-genetic part of the genome there is immune-health predisposition in individuals. This predisposition means that if certain individuals are exposed to Covid-19 infection they will deteriorate due to the nature of their immune response and will not respond to standard treatment (hence they are moved to ICU). They undergo hyperinflammation, often targeting specific organs.

### Further Work Relating to the Markers of Table 7

Marker Selection from Array

[0391] The data is loaded and normalized using R Limma package, first the Agilent control probes are removed, next step is to exclude any probes that are above the saturation point for the system 65,525, this is due to the range of detection by the scanners. The next two steps relate to normalization of the data, first there is a background correction, then a normalization between the arrays is performed using a quantile approach, this standardizes the probes on the arrays and between arrays, both these steps minimize non-biological variation.

[0392] Directly after normalization the positive and spike in controls are removed prior to statistical analysis. Two statistical procedures are adopted for statistical analysis, linear modelling using the LIMMA package and Rank Product analysis using BigRankProduct package. The linear analysis is a parametric approach and Rank Product a non-parametric approach. In order for the probes to be statistically significant they have to be below <=0.05 for the adjusted p-value. The statistic lists from both approaches are compared and the union of the two is restricted further by two steps. The next filter on the combined statistical list is abundance, probes have to be either −1.2<= or =>1.2 in the abundance scale. This list is then further filtered for translation to qPCR by considering the normalized intensity of the samples, all samples have to be above =>1000 in intensity units or =>9.66 in log 2 scale. Once these filters have been applied the data is ranked by the probes abundance value (descending for positive integers, and ascending for negative integers), the top 120-200 markers from the positive and negative selection, form the list of markers used in translation to the qPCR platform.

### Final C19 Models

[0393] The final binary outcome COVID19 model has been built using WHO classification where severity is determined if the patients have been ventilated (see below).

ASTERIX Severity Groups for Cohort Partitioning

| | | SARS- | | | Severe Resp Failure | Critical Respiratory | |
|---|---|---|---|---|---|---|---|
| | | COV-2 | COVID | Admitted to | (>Step 6i.e. Max | Failure requiring | |
| | | PCR+ | Pneumonia | Hospital | 02%260% or CPAP) | ventilation | Dead |
| 1 | Mild | YES | Not required but | NO | NO | NO | NO |
| | | | report if YES | | | | |
| 2 | Moderate | YES | Not required but | YES | NO | NO | NO |
| | | | report if YES | | | | |
| 3 | Severe | YES | Not required but | YES | YES | NO | NO |
| | | | report if YES | | | | |
| 4 | Very | YES | Not required but | YES | Not required but | YES | NO |
| | Severe | | report if YES | | report if YES | | |
| 5 | Fatal | YES | Not required but | Not required but | Not required but | Not required but | YES |
| | | | report if YES | report if YES | report if YES | report if YES | |

| | | |
|---|---|---|
| ↓ | ↓ | ↓ |
| This corresponds to | This corresponds to | This corresponds to |
| Clinical Progression | Clinical Progression | Clinical Progression |
| Model 1 in the | Model 2 in the | Model 3 in the |
| protocol/SAP | protocol/SAP | protocol/SAP |

[0394] The at-risk patients (very severe, Yes to ventilation) are ones who need ventilation, and the ones not requiring ventilation form the other set in this classifier, average-risk (No to ventilation). Two boosting classifiers form the bases of the CST model, XGBoost (Extreme Gradient Boosting) and CatBoost (gradient boosting on decision trees), the probabilities from these models are combined and the call of high-risk are patients who achieve a combined probability score=>0.75, the average-risk patients are ones whose combined probability score is below <0.75.

### Final Combined Model Stats

[0395] The first confusion table is the training and 2 test sets combined.

[0396] Statistics (n=116) for prediction of High Risk (Critical/Severe (ICU))
[0397] Accuracy: 92%
[0398] Sensitivity: 96%
[0399] Specificity: 86%
[0400] PPV: 92%
[0401] NPV: 93%

[0402] See below:

### Confusion Matrix and Statistics

Reference

| Prediction | No | Yes |
|---|---|---|
| No | 38 | 3 |
| Yes | 6 | 69 |

[0403] Accuracy: 0.9224
[0404] 95% CI: (0.8578, 0.9639)
[0405] No Information Rate: 0.6207
[0406] P-Value [Acc >NIR]: 9.843e-14
[0407] Kappa: 0.833
[0408] Mcnemar's Test P-Value: 0.505
[0409] Sensitivity: 0.9583
[0410] Specificity: 0.8636
[0411] Pos Pred Value: 0.9200
[0412] Neg Pred Value: 0.9268
[0413] Prevalence: 0.6207
[0414] Detection Rate: 0.5948
[0415] Detection Prevalence: 0.6466
[0416] Balanced Accuracy: 0.9110
[0417] ‘Positive’ Class: Yes

[0418] The second is the 2 test sets combined: 28 ventilated patients (mixture of ICU (18) and not (10)) and patients who died (11 ICU, 8 non ICU, who were not ventilated). These 2 sets were not used in the model building. This is shown below:

| | |
|---|---|
| > | cm.m_3<−confusionMatrix(as.factor(c$Ventilation), |

as.factor(c$call),positive=“Yes”)

| | |
|---|---|
| > | cm.m_3 |

combined
Confusion Matrix and Statistics

| | Reference | | |
|---|---|---|---|
| Prediction | | No | Yes |
| | No | 38 | 3 |
| | Yes | 6 | 69 |

| | |
|---|---|
| Accuracy | : 0.9224 |
| 95% CI | : (0.8578, 0.9639) |

| | |
|---|---|
| No Information Rate | : 0.6207 |
| P-Value [Acc > NIR] | : 9.843e−14 |

| | |
|---|---|
| Kappa | : 0.833 |

| Mcnemar's Test P-Value | | : 0.505 |
|---|---|---|
| | Sensitivity | : 0.9583 |
| | Specificity | : 0.8636 |

| | |
|---|---|
| Pos Pred Value | : 0.9200 |
| Neg Pred Value | : 0.9268 |

| | |
|---|---|
| Prevalence | : 0.6207 |

| | |
|---|---|
| Detection Rate | : 0.5948 |
| Detection Prevalence | : 0.6466 |
| Balanced Accuracy | : 0.9110 |
| ‘Positive’ Class | : Yes |

test sets
Confusion Matrix and Statistics

| | Reference | | |
|---|---|---|---|
| Prediction | | No | Yes |
| | No | 5 | 3 |
| | Yes | 6 | 33 |

| | |
|---|---|
| Accuracy | : 0.8085 |
| 95% CI | : (0.6674, 0.9085) |

| | |
|---|---|
| No Information Rate | : 0.766 |
| P-Value [Acc > NIR] | : 0.311 |

| | |
|---|---|
| Kappa | : 0.41 |

| Mcnemar's Test P-Value | | : 0.505 |
|---|---|---|
| | Sensitivity | : 0.9167 |
| | Specificity | : 0.4545 |

| | |
|---|---|
| Pos Pred Value | : 0.8462 |
| Neg Pred Value | : 0.6250 |

| | |
|---|---|
| Prevalence | : 0.7660 |

| | |
|---|---|
| Detection Rate | : 0.7021 |
| Detection Prevalence | : 0.8298 |
| Balanced Accuracy | : 0.6856 |
| ‘Positive’ Class | : Yes |

| | |
|---|---|
| > | c %>% filter(Ventilation==“Yes” & In._ICU==“No”) %>% count( ) |
| | n |
| 1 | 16 |

>

### Further Conclusions

[0419] In terms of efficiency of testing a qPCR format has many advantages, with a highly effective design of the paired primers and probes providing high efficacy of detection.

[0420] Further technical advantages are gained by using a number of markers together in a test. Systemic epigenetic readouts based on EpiSwitch markers capture the functional set up of biological network regulation at cellular levels reflecting the underlying specific pathological phenotype. Stratification models may be based on groups of biomarkers that reflect regulatory network inter-relationships and synchronization between individual contributing factors. This can be combined with machine learning models and a decision can be taken on ‘optimised modelling’, including how many markers to use in a test.

### Sepsis Work

[0421] The markers were further analysed to identify those that correlated with sepsis phenotypes. The results are provided in Tables 12 and 13 and FIG. 22. It must be noted that PSMAS is a gene that has already been identified in the sepsis field as well as in Covid studies as a possible therapeutic target. The present work for the first time directly shows PSMAS locus involvement in the same dysregulation network at chromosome conformation level in both Covid and sepsis conditions, and provides markers for monitoring sepsis and determining prognosis of sepsis-like outcomes in coronavirus patients.

Lengthy table referenced here
US20260002208A1-20260101-T00001
Please refer to the end of the specification for access instructions.

Lengthy table referenced here
US20260002208A1-20260101-T00002
Please refer to the end of the specification for access instructions.

Lengthy table referenced here
US20260002208A1-20260101-T00003
Please refer to the end of the specification for access instructions.

Lengthy table referenced here
US20260002208A1-20260101-T00004
Please refer to the end of the specification for access instructions.

Lengthy table referenced here
US20260002208A1-20260101-T00005
Please refer to the end of the specification for access instructions.

Lengthy table referenced here
US20260002208A1-20260101-T00006
Please refer to the end of the specification for access instructions.

Lengthy table referenced here
US20260002208A1-20260101-T00007
Please refer to the end of the specification for access instructions.

Lengthy table referenced here
US20260002208A1-20260101-T00008
Please refer to the end of the specification for access instructions.

Lengthy table referenced here
US20260002208A1-20260101-T00009
Please refer to the end of the specification for access instructions.

Lengthy table referenced here
US20260002208A1-20260101-T00010
Please refer to the end of the specification for access instructions.

Lengthy table referenced here
US20260002208A1-20260101-T00011
Please refer to the end of the specification for access instructions.

Lengthy table referenced here
US20260002208A1-20260101-T00012
Please refer to the end of the specification for access instructions.

Lengthy table referenced here
US20260002208A1-20260101-T00013
Please refer to the end of the specification for access instructions.

Lengthy table referenced here
US20260002208A1-20260101-T00014
Please refer to the end of the specification for access instructions.

Lengthy table referenced here
US20260002208A1-20260101-T00015
Please refer to the end of the specification for access instructions.

Lengthy table referenced here
US20260002208A1-20260101-T00016
Please refer to the end of the specification for access instructions.

Lengthy table referenced here
US20260002208A1-20260101-T00017
Please refer to the end of the specification for access instructions.

Lengthy table referenced here
US20260002208A1-20260101-T00018
Please refer to the end of the specification for access instructions.

Lengthy table referenced here
US20260002208A1-20260101-T00019
Please refer to the end of the specification for access instructions.

Lengthy table referenced here
US20260002208A1-20260101-T00020
Please refer to the end of the specification for access instructions.

Lengthy table referenced here
US20260002208A1-20260101-T00021
Please refer to the end of the specification for access instructions.

Lengthy table referenced here
US20260002208A1-20260101-T00022
Please refer to the end of the specification for access instructions.

Lengthy table referenced here
US20260002208A1-20260101-T00023
Please refer to the end of the specification for access instructions.

Lengthy table referenced here
US20260002208A1-20260101-T00024
Please refer to the end of the specification for access instructions.

Lengthy table referenced here
US20260002208A1-20260101-T00025
Please refer to the end of the specification for access instructions.

Lengthy table referenced here
US20260002208A1-20260101-T00026
Please refer to the end of the specification for access instructions.

Lengthy table referenced here
US20260002208A1-20260101-T00027
Please refer to the end of the specification for access instructions.

Lengthy table referenced here
US20260002208A1-20260101-T00028
Please refer to the end of the specification for access instructions.

Lengthy table referenced here
US20260002208A1-20260101-T00029
Please refer to the end of the specification for access instructions.

Lengthy table referenced here
US20260002208A1-20260101-T00030
Please refer to the end of the specification for access instructions.

Lengthy table referenced here
US20260002208A1-20260101-T00031
Please refer to the end of the specification for access instructions.

Lengthy table referenced here
US20260002208A1-20260101-T00032
Please refer to the end of the specification for access instructions.

Lengthy table referenced here
US20260002208A1-20260101-T00033
Please refer to the end of the specification for access instructions.

Lengthy table referenced here
US20260002208A1-20260101-T00034
Please refer to the end of the specification for access instructions.

Lengthy table referenced here
US20260002208A1-20260101-T00035
Please refer to the end of the specification for access instructions.

Lengthy table referenced here
US20260002208A1-20260101-T00036
Please refer to the end of the specification for access instructions.

Lengthy table referenced here
US20260002208A1-20260101-T00037
Please refer to the end of the specification for access instructions.

Lengthy table referenced here
US20260002208A1-20260101-T00038
Please refer to the end of the specification for access instructions.

Lengthy table referenced here
US20260002208A1-20260101-T00039
Please refer to the end of the specification for access instructions.

Lengthy table referenced here
US20260002208A1-20260101-T00040
Please refer to the end of the specification for access instructions.

Lengthy table referenced here
US20260002208A1-20260101-T00041
Please refer to the end of the specification for access instructions.

Lengthy table referenced here
US20260002208A1-20260101-T00042
Please refer to the end of the specification for access instructions.

Lengthy table referenced here
US20260002208A1-20260101-T00043
Please refer to the end of the specification for access instructions.

Lengthy table referenced here
US20260002208A1-20260101-T00044
Please refer to the end of the specification for access instructions.

Lengthy table referenced here
US20260002208A1-20260101-T00045
Please refer to the end of the specification for access instructions.

Lengthy table referenced here
US20260002208A1-20260101-T00046
Please refer to the end of the specification for access instructions.

Lengthy table referenced here
US20260002208A1-20260101-T00047
Please refer to the end of the specification for access instructions.

Lengthy table referenced here
US20260002208A1-20260101-T00048
Please refer to the end of the specification for access instructions.

Lengthy table referenced here
US20260002208A1-20260101-T00049
Please refer to the end of the specification for access instructions.

Lengthy table referenced here
US20260002208A1-20260101-T00050
Please refer to the end of the specification for access instructions.

Lengthy table referenced here
US20260002208A1-20260101-T00051
Please refer to the end of the specification for access instructions.

Lengthy table referenced here
US20260002208A1-20260101-T00052
Please refer to the end of the specification for access instructions.

Lengthy table referenced here
US20260002208A1-20260101-T00053
Please refer to the end of the specification for access instructions.

Lengthy table referenced here
US20260002208A1-20260101-T00054
Please refer to the end of the specification for access instructions.

Lengthy table referenced here
US20260002208A1-20260101-T00055
Please refer to the end of the specification for access instructions.

Lengthy table referenced here
US20260002208A1-20260101-T00056
Please refer to the end of the specification for access instructions.

Lengthy table referenced here
US20260002208A1-20260101-T00057
Please refer to the end of the specification for access instructions.

Lengthy table referenced here
US20260002208A1-20260101-T00058
Please refer to the end of the specification for access instructions.

Lengthy table referenced here
US20260002208A1-20260101-T00059
Please refer to the end of the specification for access instructions.

Lengthy table referenced here
US20260002208A1-20260101-T00060
Please refer to the end of the specification for access instructions.

Lengthy table referenced here
US20260002208A1-20260101-T00061
Please refer to the end of the specification for access instructions.

Lengthy table referenced here
US20260002208A1-20260101-T00062
Please refer to the end of the specification for access instructions.

Lengthy table referenced here
US20260002208A1-20260101-T00063
Please refer to the end of the specification for access instructions.

Lengthy table referenced here
US20260002208A1-20260101-T00064
Please refer to the end of the specification for access instructions.

Lengthy table referenced here
US20260002208A1-20260101-T00065
Please refer to the end of the specification for access instructions.

Lengthy table referenced here
US20260002208A1-20260101-T00066
Please refer to the end of the specification for access instructions.

Lengthy table referenced here
US20260002208A1-20260101-T00067
Please refer to the end of the specification for access instructions.

Lengthy table referenced here
US20260002208A1-20260101-T00068
Please refer to the end of the specification for access instructions.

Lengthy table referenced here
US20260002208A1-20260101-T00069
Please refer to the end of the specification for access instructions.

Lengthy table referenced here
US20260002208A1-20260101-T00070
Please refer to the end of the specification for access instructions.

Lengthy table referenced here
US20260002208A1-20260101-T00071
Please refer to the end of the specification for access instructions.

Lengthy table referenced here
US20260002208A1-20260101-T00072
Please refer to the end of the specification for access instructions.

Lengthy table referenced here
US20260002208A1-20260101-T00073
Please refer to the end of the specification for access instructions.

Lengthy table referenced here
US20260002208A1-20260101-T00074
Please refer to the end of the specification for access instructions.

Lengthy table referenced here
US20260002208A1-20260101-T00075
Please refer to the end of the specification for access instructions.

Lengthy table referenced here
US20260002208A1-20260101-T00076
Please refer to the end of the specification for access instructions.

Lengthy table referenced here
US20260002208A1-20260101-T00077
Please refer to the end of the specification for access instructions.

Lengthy table referenced here
US20260002208A1-20260101-T00078
Please refer to the end of the specification for access instructions.

Lengthy table referenced here
US20260002208A1-20260101-T00079
Please refer to the end of the specification for access instructions.

Lengthy table referenced here
US20260002208A1-20260101-T00080
Please refer to the end of the specification for access instructions.

Lengthy table referenced here
US20260002208A1-20260101-T00081
Please refer to the end of the specification for access instructions.

Lengthy table referenced here
US20260002208A1-20260101-T00082
Please refer to the end of the specification for access instructions.

Lengthy table referenced here
US20260002208A1-20260101-T00083
Please refer to the end of the specification for access instructions.

Lengthy table referenced here
US20260002208A1-20260101-T00084
Please refer to the end of the specification for access instructions.

Lengthy table referenced here
US20260002208A1-20260101-T00085
Please refer to the end of the specification for access instructions.

Lengthy table referenced here
US20260002208A1-20260101-T00086
Please refer to the end of the specification for access instructions.

Lengthy table referenced here
US20260002208A1-20260101-T00087
Please refer to the end of the specification for access instructions.

Lengthy table referenced here
US20260002208A1-20260101-T00088
Please refer to the end of the specification for access instructions.

Lengthy table referenced here
US20260002208A1-20260101-T00089
Please refer to the end of the specification for access instructions.

Lengthy table referenced here
US20260002208A1-20260101-T00090
Please refer to the end of the specification for access instructions.

Lengthy table referenced here
US20260002208A1-20260101-T00091
Please refer to the end of the specification for access instructions.

Lengthy table referenced here
US20260002208A1-20260101-T00092
Please refer to the end of the specification for access instructions.

Lengthy table referenced here
US20260002208A1-20260101-T00093
Please refer to the end of the specification for access instructions.

Lengthy table referenced here
US20260002208A1-20260101-T00094
Please refer to the end of the specification for access instructions.

Lengthy table referenced here
US20260002208A1-20260101-T00095
Please refer to the end of the specification for access instructions.

Lengthy table referenced here
US20260002208A1-20260101-T00096
Please refer to the end of the specification for access instructions.

Lengthy table referenced here
US20260002208A1-20260101-T00097
Please refer to the end of the specification for access instructions.

Lengthy table referenced here
US20260002208A1-20260101-T00098
Please refer to the end of the specification for access instructions.

Lengthy table referenced here
US20260002208A1-20260101-T00099
Please refer to the end of the specification for access instructions.

Lengthy table referenced here
US20260002208A1-20260101-T00100
Please refer to the end of the specification for access instructions.

Lengthy table referenced here
US20260002208A1-20260101-T00101
Please refer to the end of the specification for access instructions.

Lengthy table referenced here
US20260002208A1-20260101-T00102
Please refer to the end of the specification for access instructions.

Lengthy table referenced here
US20260002208A1-20260101-T00103
Please refer to the end of the specification for access instructions.

Lengthy table referenced here
US20260002208A1-20260101-T00104
Please refer to the end of the specification for access instructions.

Lengthy table referenced here
US20260002208A1-20260101-T00105
Please refer to the end of the specification for access instructions.

Lengthy table referenced here
US20260002208A1-20260101-T00106
Please refer to the end of the specification for access instructions.

Lengthy table referenced here
US20260002208A1-20260101-T00107
Please refer to the end of the specification for access instructions.

Lengthy table referenced here
US20260002208A1-20260101-T00108
Please refer to the end of the specification for access instructions.

Lengthy table referenced here
US20260002208A1-20260101-T00109
Please refer to the end of the specification for access instructions.

Lengthy table referenced here
US20260002208A1-20260101-T00110
Please refer to the end of the specification for access instructions.

Lengthy table referenced here
US20260002208A1-20260101-T00111
Please refer to the end of the specification for access instructions.

Lengthy table referenced here
US20260002208A1-20260101-T00112
Please refer to the end of the specification for access instructions.

Lengthy table referenced here
US20260002208A1-20260101-T00113
Please refer to the end of the specification for access instructions.

Lengthy table referenced here
US20260002208A1-20260101-T00114
Please refer to the end of the specification for access instructions.

Lengthy table referenced here
US20260002208A1-20260101-T00115
Please refer to the end of the specification for access instructions.

Lengthy table referenced here
US20260002208A1-20260101-T00116
Please refer to the end of the specification for access instructions.

Lengthy table referenced here
US20260002208A1-20260101-T00117
Please refer to the end of the specification for access instructions.

Lengthy table referenced here
US20260002208A1-20260101-T00118
Please refer to the end of the specification for access instructions.

Lengthy table referenced here
US20260002208A1-20260101-T00119
Please refer to the end of the specification for access instructions.

Lengthy table referenced here
US20260002208A1-20260101-T00120
Please refer to the end of the specification for access instructions.

Lengthy table referenced here
US20260002208A1-20260101-T00121
Please refer to the end of the specification for access instructions.

Lengthy table referenced here
US20260002208A1-20260101-T00122
Please refer to the end of the specification for access instructions.

Lengthy table referenced here
US20260002208A1-20260101-T00123
Please refer to the end of the specification for access instructions.

Lengthy table referenced here
US20260002208A1-20260101-T00124
Please refer to the end of the specification for access instructions.

Lengthy table referenced here
US20260002208A1-20260101-T00125
Please refer to the end of the specification for access instructions.

Lengthy table referenced here
US20260002208A1-20260101-T00126
Please refer to the end of the specification for access instructions.

Lengthy table referenced here
US20260002208A1-20260101-T00127
Please refer to the end of the specification for access instructions.

Lengthy table referenced here
US20260002208A1-20260101-T00128
Please refer to the end of the specification for access instructions.

Lengthy table referenced here
US20260002208A1-20260101-T00129
Please refer to the end of the specification for access instructions.

Lengthy table referenced here
US20260002208A1-20260101-T00130
Please refer to the end of the specification for access instructions.

Lengthy table referenced here
US20260002208A1-20260101-T00131
Please refer to the end of the specification for access instructions.

Lengthy table referenced here
US20260002208A1-20260101-T00132
Please refer to the end of the specification for access instructions.

Lengthy table referenced here
US20260002208A1-20260101-T00133
Please refer to the end of the specification for access instructions.

Lengthy table referenced here
US20260002208A1-20260101-T00134
Please refer to the end of the specification for access instructions.

Lengthy table referenced here
US20260002208A1-20260101-T00135
Please refer to the end of the specification for access instructions.

Lengthy table referenced here
US20260002208A1-20260101-T00136
Please refer to the end of the specification for access instructions.

Lengthy table referenced here
US20260002208A1-20260101-T00137
Please refer to the end of the specification for access instructions.

Lengthy table referenced here
US20260002208A1-20260101-T00138
Please refer to the end of the specification for access instructions.

Lengthy table referenced here
US20260002208A1-20260101-T00139
Please refer to the end of the specification for access instructions.

Lengthy table referenced here
US20260002208A1-20260101-T00140
Please refer to the end of the specification for access instructions.

Lengthy table referenced here
US20260002208A1-20260101-T00141
Please refer to the end of the specification for access instructions.

Lengthy table referenced here
US20260002208A1-20260101-T00142
Please refer to the end of the specification for access instructions.

Lengthy table referenced here
US20260002208A1-20260101-T00143
Please refer to the end of the specification for access instructions.

Lengthy table referenced here
US20260002208A1-20260101-T00144
Please refer to the end of the specification for access instructions.

Lengthy table referenced here
US20260002208A1-20260101-T00145
Please refer to the end of the specification for access instructions.

Lengthy table referenced here
US20260002208A1-20260101-T00146
Please refer to the end of the specification for access instructions.

Lengthy table referenced here
US20260002208A1-20260101-T00147
Please refer to the end of the specification for access instructions.

Lengthy table referenced here
US20260002208A1-20260101-T00148
Please refer to the end of the specification for access instructions.

Lengthy table referenced here
US20260002208A1-20260101-T00149
Please refer to the end of the specification for access instructions.

Lengthy table referenced here
US20260002208A1-20260101-T00150
Please refer to the end of the specification for access instructions.

Lengthy table referenced here
US20260002208A1-20260101-T00151
Please refer to the end of the specification for access instructions.

Lengthy table referenced here
US20260002208A1-20260101-T00152
Please refer to the end of the specification for access instructions.

Lengthy table referenced here
US20260002208A1-20260101-T00153
Please refer to the end of the specification for access instructions.

Lengthy table referenced here
US20260002208A1-20260101-T00154
Please refer to the end of the specification for access instructions.

Lengthy table referenced here
US20260002208A1-20260101-T00155
Please refer to the end of the specification for access instructions.

Lengthy table referenced here
US20260002208A1-20260101-T00156
Please refer to the end of the specification for access instructions.

Lengthy table referenced here
US20260002208A1-20260101-T00157
Please refer to the end of the specification for access instructions.

Lengthy table referenced here
US20260002208A1-20260101-T00158
Please refer to the end of the specification for access instructions.

Lengthy table referenced here
US20260002208A1-20260101-T00159
Please refer to the end of the specification for access instructions.

Lengthy table referenced here
US20260002208A1-20260101-T00160
Please refer to the end of the specification for access instructions.

Lengthy table referenced here
US20260002208A1-20260101-T00161
Please refer to the end of the specification for access instructions.

Lengthy table referenced here
US20260002208A1-20260101-T00162
Please refer to the end of the specification for access instructions.

Lengthy table referenced here
US20260002208A1-20260101-T00163
Please refer to the end of the specification for access instructions.

Lengthy table referenced here
US20260002208A1-20260101-T00164
Please refer to the end of the specification for access instructions.

Lengthy table referenced here
US20260002208A1-20260101-T00165
Please refer to the end of the specification for access instructions.

Lengthy table referenced here
US20260002208A1-20260101-T00166
Please refer to the end of the specification for access instructions.

Lengthy table referenced here
US20260002208A1-20260101-T00167
Please refer to the end of the specification for access instructions.

Lengthy table referenced here
US20260002208A1-20260101-T00168
Please refer to the end of the specification for access instructions.

Lengthy table referenced here
US20260002208A1-20260101-T00169
Please refer to the end of the specification for access instructions.

Lengthy table referenced here
US20260002208A1-20260101-T00170
Please refer to the end of the specification for access instructions.

Lengthy table referenced here
US20260002208A1-20260101-T00171
Please refer to the end of the specification for access instructions.

Lengthy table referenced here
US20260002208A1-20260101-T00172
Please refer to the end of the specification for access instructions.

Lengthy table referenced here
US20260002208A1-20260101-T00173
Please refer to the end of the specification for access instructions.

Lengthy table referenced here
US20260002208A1-20260101-T00174
Please refer to the end of the specification for access instructions.

Lengthy table referenced here
US20260002208A1-20260101-T00175
Please refer to the end of the specification for access instructions.

Lengthy table referenced here
US20260002208A1-20260101-T00176
Please refer to the end of the specification for access instructions.

Lengthy table referenced here
US20260002208A1-20260101-T00177
Please refer to the end of the specification for access instructions.

Lengthy table referenced here
US20260002208A1-20260101-T00178
Please refer to the end of the specification for access instructions.

Lengthy table referenced here
US20260002208A1-20260101-T00179
Please refer to the end of the specification for access instructions.

Lengthy table referenced here
US20260002208A1-20260101-T00180
Please refer to the end of the specification for access instructions.

Lengthy table referenced here
US20260002208A1-20260101-T00181
Please refer to the end of the specification for access instructions.

Lengthy table referenced here
US20260002208A1-20260101-T00182
Please refer to the end of the specification for access instructions.

Lengthy table referenced here
US20260002208A1-20260101-T00183
Please refer to the end of the specification for access instructions.

Lengthy table referenced here
US20260002208A1-20260101-T00184
Please refer to the end of the specification for access instructions.

Lengthy table referenced here
US20260002208A1-20260101-T00185
Please refer to the end of the specification for access instructions.

Lengthy table referenced here
US20260002208A1-20260101-T00186
Please refer to the end of the specification for access instructions.

Lengthy table referenced here
US20260002208A1-20260101-T00187
Please refer to the end of the specification for access instructions.

Lengthy table referenced here
US20260002208A1-20260101-T00188
Please refer to the end of the specification for access instructions.

Lengthy table referenced here
US20260002208A1-20260101-T00189
Please refer to the end of the specification for access instructions.

Lengthy table referenced here
US20260002208A1-20260101-T00190
Please refer to the end of the specification for access instructions.

Lengthy table referenced here
US20260002208A1-20260101-T00191
Please refer to the end of the specification for access instructions.

Lengthy table referenced here
US20260002208A1-20260101-T00192
Please refer to the end of the specification for access instructions.

Lengthy table referenced here
US20260002208A1-20260101-T00193
Please refer to the end of the specification for access instructions.

Lengthy table referenced here
US20260002208A1-20260101-T00194
Please refer to the end of the specification for access instructions.

Lengthy table referenced here
US20260002208A1-20260101-T00195
Please refer to the end of the specification for access instructions.

Lengthy table referenced here
US20260002208A1-20260101-T00196
Please refer to the end of the specification for access instructions.

Lengthy table referenced here
US20260002208A1-20260101-T00197
Please refer to the end of the specification for access instructions.

Lengthy table referenced here
US20260002208A1-20260101-T00198
Please refer to the end of the specification for access instructions.

Lengthy table referenced here
US20260002208A1-20260101-T00199
Please refer to the end of the specification for access instructions.

Lengthy table referenced here
US20260002208A1-20260101-T00200
Please refer to the end of the specification for access instructions.

Lengthy table referenced here
US20260002208A1-20260101-T00201
Please refer to the end of the specification for access instructions.

Lengthy table referenced here
US20260002208A1-20260101-T00202
Please refer to the end of the specification for access instructions.

Lengthy table referenced here
US20260002208A1-20260101-T00203
Please refer to the end of the specification for access instructions.

Lengthy table referenced here
US20260002208A1-20260101-T00204
Please refer to the end of the specification for access instructions.

Lengthy table referenced here
US20260002208A1-20260101-T00205
Please refer to the end of the specification for access instructions.

Lengthy table referenced here
US20260002208A1-20260101-T00206
Please refer to the end of the specification for access instructions.

Lengthy table referenced here
US20260002208A1-20260101-T00207
Please refer to the end of the specification for access instructions.

Lengthy table referenced here
US20260002208A1-20260101-T00208
Please refer to the end of the specification for access instructions.

Lengthy table referenced here
US20260002208A1-20260101-T00209
Please refer to the end of the specification for access instructions.

Lengthy table referenced here
US20260002208A1-20260101-T00210
Please refer to the end of the specification for access instructions.

Lengthy table referenced here
US20260002208A1-20260101-T00211
Please refer to the end of the specification for access instructions.

Lengthy table referenced here
US20260002208A1-20260101-T00212
Please refer to the end of the specification for access instructions.

Lengthy table referenced here
US20260002208A1-20260101-T00213
Please refer to the end of the specification for access instructions.

Lengthy table referenced here
US20260002208A1-20260101-T00214
Please refer to the end of the specification for access instructions.

Lengthy table referenced here
US20260002208A1-20260101-T00215
Please refer to the end of the specification for access instructions.

Lengthy table referenced here
US20260002208A1-20260101-T00216
Please refer to the end of the specification for access instructions.

Lengthy table referenced here
US20260002208A1-20260101-T00217
Please refer to the end of the specification for access instructions.

Lengthy table referenced here
US20260002208A1-20260101-T00218
Please refer to the end of the specification for access instructions.

Lengthy table referenced here
US20260002208A1-20260101-T00219
Please refer to the end of the specification for access instructions.

Lengthy table referenced here
US20260002208A1-20260101-T00220
Please refer to the end of the specification for access instructions.

Lengthy table referenced here
US20260002208A1-20260101-T00221
Please refer to the end of the specification for access instructions.

Lengthy table referenced here
US20260002208A1-20260101-T00222
Please refer to the end of the specification for access instructions.

Lengthy table referenced here
US20260002208A1-20260101-T00223
Please refer to the end of the specification for access instructions.

Lengthy table referenced here
US20260002208A1-20260101-T00224
Please refer to the end of the specification for access instructions.

Lengthy table referenced here
US20260002208A1-20260101-T00225
Please refer to the end of the specification for access instructions.

Lengthy table referenced here
US20260002208A1-20260101-T00226
Please refer to the end of the specification for access instructions.

Lengthy table referenced here
US20260002208A1-20260101-T00227
Please refer to the end of the specification for access instructions.

Lengthy table referenced here
US20260002208A1-20260101-T00228
Please refer to the end of the specification for access instructions.

Lengthy table referenced here
US20260002208A1-20260101-T00229
Please refer to the end of the specification for access instructions.

Lengthy table referenced here
US20260002208A1-20260101-T00230
Please refer to the end of the specification for access instructions.

Lengthy table referenced here
US20260002208A1-20260101-T00231
Please refer to the end of the specification for access instructions.

Lengthy table referenced here
US20260002208A1-20260101-T00232
Please refer to the end of the specification for access instructions.

Lengthy table referenced here
US20260002208A1-20260101-T00233
Please refer to the end of the specification for access instructions.

Lengthy table referenced here
US20260002208A1-20260101-T00234
Please refer to the end of the specification for access instructions.

Lengthy table referenced here
US20260002208A1-20260101-T00235
Please refer to the end of the specification for access instructions.

Lengthy table referenced here
US20260002208A1-20260101-T00236
Please refer to the end of the specification for access instructions.

Lengthy table referenced here
US20260002208A1-20260101-T00237
Please refer to the end of the specification for access instructions.

Lengthy table referenced here
US20260002208A1-20260101-T00238
Please refer to the end of the specification for access instructions.

Lengthy table referenced here
US20260002208A1-20260101-T00239
Please refer to the end of the specification for access instructions.

Lengthy table referenced here
US20260002208A1-20260101-T00240
Please refer to the end of the specification for access instructions.

Lengthy table referenced here
US20260002208A1-20260101-T00241
Please refer to the end of the specification for access instructions.

Lengthy table referenced here
US20260002208A1-20260101-T00242
Please refer to the end of the specification for access instructions.

Lengthy table referenced here
US20260002208A1-20260101-T00243
Please refer to the end of the specification for access instructions.

Lengthy table referenced here
US20260002208A1-20260101-T00244
Please refer to the end of the specification for access instructions.

Lengthy table referenced here
US20260002208A1-20260101-T00245
Please refer to the end of the specification for access instructions.

Lengthy table referenced here
US20260002208A1-20260101-T00246
Please refer to the end of the specification for access instructions.

LENGTHY TABLES
The patent application contains a lengthy table section. A copy of the table is available in electronic form from the USPTO web site (https://seqdata.uspto.gov/docdetail?docId=US20260002208A1). An electronic copy of the table will also be available from the USPTO upon request and payment of the fee set forth in 37 CFR 1.19(b)(3).

1. A method of detecting prognosis for coronavirus infection in an individual, comprising determining the presence or absence of one or more chromosome interactions represented by the probes shown in Table 1 or 3, to thereby determine said prognosis in the individual.

2. A method according to claim 1 wherein:
(i) at least 5 chromosome interactions are typed from Table 1, and/or
(ii) at least 5 chromosome interactions are typed from Table 3.

3. A method according to claim 1 wherein said coronavirus infection is Covid-19 infection.

4. A method according to claim 1 wherein:
(i) at least 5 chromosome interactions are typed from Table 2, and/or
(ii) at least 5 chromosome interactions are typed from Table 4.

5. A method according to claim 1 wherein the chromosome interactions are typed:
in a sample from an individual, and/or
by detecting the presence or absence of a DNA loop at the site of the chromosome interactions, and/or
detecting the presence or absence of distal regions of a chromosome being brought together in a chromosome conformation, and/or
by detecting the presence of a ligated nucleic acid which is generated during said typing and whose sequence comprises two regions each corresponding to the regions of the chromosome which come together in the chromosome interaction, and/or
by a process which detects the proximity of the chromosome regions which have come together in the chromosome interaction.

6. A method according to claim 1 wherein said detecting of the presence or absence of the chromosome interactions is by a process comprising:
(i) in vitro crosslinking of epigenetic chromosomal interactions which are present;
(ii) optionally isolating the cross-linked DNA;
(iii) subjecting said cross-linked DNA to cleaving;
(iv) ligating said cross-linked cleaved DNA ends to form ligated DNA; and
(v) identifying the presence or absence of said ligated DNA;
to thereby determine the presence or absence of the chromosome interaction.

7. A method according to claim 5 wherein said ligated DNA is detected by PCR or by use of a probe.

8. A method according to claim 7 wherein:
(i) detection is by use of a probe, wherein said probe has at least 70% identity to any of the probes shown in Table 1 or 3, or
(ii) detection is by use of PCR, wherein the PCR uses a primer pair that has at least 70% identity to any of the primer pairs shown in Table 1 or 3.

9. A method according to claim 1 wherein:
(i) the method is carried out prognostically, in advance, to detect a high-risk of subsequent severe hyperinflammatory complications for an individual upon exposure to a coronavirus, such as Covid-19, and/or
(ii) the method is carried out to select an individual for receiving therapy or a treatment for coronavirus infection, and/or
(iii) the method is carried out on individual that has been preselected based on a physical characteristic, risk factor or the presence of a symptom, and/or
(iv) the method is carried out to determine prognosis for severity of coronavirus infection, and/or
(v) the method is carried out to determine prognosis for developing sepsis as part of coronavirus disease, and/or
(vi) the method is carried out to determine prognosis for cytokine release syndrome as part of coronavirus disease.

10. A method according to claim 1 wherein the individual:
(i) is suspected of having coronavirus or Covid-19 infection, and/or
(ii) has been admitted to hospital.

11.-12. (canceled)

13. A method of detecting prognosis for coronavirus infection in an individual, comprising determining the presence or absence of one or more chromosome interactions represented by the probes shown in Table 7, to thereby determine said prognosis in the individual.

14. A method according to claim 13 wherein at least 3, 4, 5 or 6 chromosome interactions are typed from Table 7 and/or wherein said coronavirus infection is Covid-19 infection.

15. A method according to claim 13 wherein the chromosome interactions are typed:
in a sample from an individual, and/or
by detecting the presence or absence of a DNA loop at the site of the chromosome interactions, and/or
detecting the presence or absence of distal regions of a chromosome being brought together in a chromosome conformation, and/or
by detecting the presence of a ligated nucleic acid which is generated during said typing and whose sequence comprises two regions each corresponding to the regions of the chromosome which come together in the chromosome interaction, and/or
by a process which detects the proximity of the chromosome regions which have come together in the chromosome interaction.

16. A method according to claim 13 wherein said detecting of the presence or absence of the chromosome interactions is by a process comprising:
(i) in vitro crosslinking of epigenetic chromosomal interactions which are present;
(ii) optionally isolating the cross-linked DNA;
(iii) subjecting said cross-linked DNA to cleaving;
(iv) ligating said cross-linked cleaved DNA ends to form ligated DNA; and
(v) identifying the presence or absence of said ligated DNA;
to thereby determine the presence or absence of the chromosome interaction.

17. A method according to claim 13 wherein said ligated DNA is detected by PCR or by use of a probe.

18. A method according to claim 17 wherein:
(i) detection is by use of a probe, wherein said probe has at least 70% identity to any of the probes shown in Table 7, or
(ii) detection is by use of PCR, wherein the PCR uses a primer pair that has at least 70% identity to any of the primer pairs shown in Table 7.

19. A method according to any claim 17 wherein said ligated DNA is detected using a qPCR system in which the probe has at least 70% identity to any of the probes shown in Table 7 and the primer pairs have at least 70% identity to any of the primer pairs shown in Table 7; wherein preferably the probe sequence is or comprises the sequence of a probe sequence shown in Table 7 and/or each primer has or comprises the sequence of a primer shown in Table 7.

20. A method according to claim 17 wherein the presence or absence of all 6 of the chromosome interactions represented by the probes of Table 7 is detected, optionally using all the probes and/or all primer pairs shown in Table 7.

21. A method according to claim 13 wherein:
(i) the method is carried out prognostically, in advance, to detect a high-risk of subsequent severe hyperinflammatory complications for an individual upon exposure to a coronavirus, such as Covid-19, and/or
(ii) the method is carried out to select an individual for receiving therapy or a treatment for coronavirus infection, and/or
(iii) the method is carried out on individual that has been preselected based on a physical characteristic, risk factor or the presence of a symptom, and/or
(iv) the method is carried out to determine prognosis for severity of coronavirus infection, and/or
(v) the method is carried out to determine prognosis for developing sepsis as part of coronavirus disease, and/or
(vi) the method is carried out to determine prognosis for cytokine release syndrome as part of coronavirus disease.

22. A method according to claim 13 wherein the individual:
(i) is suspected of having coronavirus or Covid-19 infection, and/or
(ii) has been admitted to hospital.

23. A method according to claim 1, wherein the typing of chromosome interactions comprises specific detection of the ligated product by quantitative PCR (qPCR) which uses primers capable of amplifying the ligated product and a probe which binds the ligation site during the PCR reaction, wherein said probe comprises sequence which is complementary to sequence from each of the chromosome regions that have come together in the chromosome interaction, wherein preferably said probe comprises:
an oligonucleotide which specifically binds to said ligated product, and/or
a fluorophore covalently attached to the 5′ end of the oligonucleotide, and/or
a quencher covalently attached to the 3′ end of the oligonucleotide, and
optionally
said fluorophore is selected from HEX, Texas Red and FAM; and/or
said probe comprises a nucleic acid sequence of length 10 to 40 nucleotide bases, preferably a length of 20 to 30 nucleotide bases.

24. A method according to claim 1 comprising determining the presence or absence of one or more chromosome interactions represented by the probes shown in any of Tables 8, 9, 10, 11, 12, 13, 14, 15, 16 or 17, to thereby determine said prognosis in the individual.

25. A method according to claim 1 comprising determining the presence or absence of:
one or more chromosome interactions associated with a severe coronavirus infection, wherein preferably said chromosome interactions are shown in Table 8, 9, 14 or 15 and/or
one or more chromosome interactions associated with a mild coronavirus infection, wherein preferably said chromosome interactions are shown in Table 10, 11, 16 or 17.

26. A method according to claim 19 wherein
(i) detection is by use of a probe, wherein said probe has at least 70% identity to any of the probes shown in Table 9 or 11, or
(ii) detection is by use of PCR, wherein the PCR uses a primer pair that has at least 70% identity to any of the primer pairs shown in Table 9 or 11.

27. A method according to claim 26 wherein said ligated DNA is detected using a qPCR system in which the probe has at least 70% identity to any of the probes shown in Table 9, 11, 14 or 16 and the primer pairs have at least 70% identity to any of the primer pairs shown in Table 9, 11, 14 or 16; wherein preferably the probe sequence is or comprises the sequence of a probe sequence shown in Table 9, 11, 14 or 16 and/or each primer has or comprises the sequence of a primer shown in Table 9, 11, 14 or 16.

28. A method according to claim 1 wherein the presence or absence of at least 5 of the chromosome interactions represented by the probes of Table 9 or 11 is detected, optionally using all the probes and/or all primer pairs shown in Table 9 or 11.

29. A method according to claim 1 which comprises detecting the sepsis status of the individual by detecting the presence or absence of any of the chromosome interactions shown in Tables 12 or 13.

30. A method according to claim 1 for treatment of severe coronavirus disease, said method comprising:
identifying whether an individual is susceptible to severe coronavirus disease by the method of claim 1, and
administering to any individual identified as being susceptible a therapeutic agent selected from any of the agents shown in Table 6.

31. A method according to claim 1 which:
prevents or treats coronavirus infection, and/or
prevents or treats a detrimental immune response; comprising
identifying an individual as being susceptible to severe disease as a result of coronavirus infection by the method of claim 1, and
administering to the identified individual an agent which prevents or treats coronavirus infection and/or prevents or treats a detrimental immune response.

32. A method according to claim 29 for treatment of sepsis, said method comprising:
identifying whether an individual is susceptible to or has sepsis by the method of claim 29, and
administering an agent which treats sepsis to an individual identified as being susceptible to or having sepsis.

33. (canceled)

The application's sequence listing, which the Patent Office published only in electronic form, follows.

SEQUENCE LISTING (5251 sequences)

SEQ ID NO: 1 - DNA, 60 bp, Homo sapiens
aggggtcactgttgattctggagtgttctcgaggtgacagattttgtagacactttatgg

SEQ ID NO: 2 - DNA, 60 bp, Homo sapiens
aggggtcactgttgattctggagtgttctcgaaagagggagaccaatagcaaaaggaaca

SEQ ID NO: 3 - DNA, 60 bp, Homo sapiens
actgaatatctctatctatgaatagagttcgatctcctgacctccatcatgtcctctctt

SEQ ID NO: 4 - DNA, 60 bp, Homo sapiens
ttaattttttaattacatttaatcagcatcgaactcctgaccttgtaatctgtccacctt

SEQ ID NO: 5 - DNA, 60 bp, Homo sapiens
ttatccaattataagtctattggctctttcgaactcctgacctcacgtaattctcccacc

SEQ ID NO: 6 - DNA, 60 bp, Homo sapiens
aaaaaaaaaaggaaaagaaagaagaaagtcgatctcctgacctagtgattggccctcctc

SEQ ID NO: 7 - DNA, 60 bp, Homo sapiens
aataaactatgactttgtgaagattcagtcgatctcctgacctagtgattggccctcctc

SEQ ID NO: 8 - DNA, 60 bp, Homo sapiens
tacgaggaaatagaataagatctagtattcgaactcctgaccctaggtgatcctcctgct

SEQ ID NO: 9 - DNA, 60 bp, Homo sapiens
atttttatttttttgtttgtttttgttttcgaactcctgacctcaggagttccacccacc

SEQ ID NO: 10 - DNA, 60 bp, Homo sapiens
tttttcagggtgtgtttccatataaagatcgaactcctgacctcaagaaatctacctgcc

SEQ ID NO: 11 - DNA, 60 bp, Homo sapiens
ctcaaagacccaaatatagaaataccattcgaactcctgaccttgtaatctgtccacctt

SEQ ID NO: 12 - DNA, 60 bp, Homo sapiens
gcattaaaaaaagataccttgttcagaatcgaactcctgacctcacgtcaattcataagt

SEQ ID NO: 13 - DNA, 60 bp, Homo sapiens
cagtcttaaaaatcaattccacaaatcatcgagaccagcctgactgatattgtgaaaccc

SEQ ID NO: 14 - DNA, 60 bp, Homo sapiens
tgcttttgtgtcacaggttttgacaacttcgaactcctgaccgaagcgatgatccagccg

SEQ ID NO: 15 - DNA, 60 bp, Homo sapiens
tatcatagtccagatgagataatttccttcgaactcctgacctcaggtagtccaactgtc

SEQ ID NO: 16 - DNA, 60 bp, Homo sapiens
acaaagcacttgaacttacattaagtcatcgagaccagcctgactgatattgtgaaaccc

SEQ ID NO: 17 - DNA, 60 bp, Homo sapiens
ggaccatttctgtagcagaaagaggaagtcgatctcctgatctcgtgatctaccttcctt

SEQ ID NO: 18 - DNA, 60 bp, Homo sapiens
tgttttttatactgcaagacagagagattcgatctcctgacctagtgattggccctcctc

SEQ ID NO: 19 - DNA, 60 bp, Homo sapiens
gttagacataaagactaatgggatagaatcgaactcctgacttcaggaaatctgcccgtc

SEQ ID NO: 20 - DNA, 60 bp, Homo sapiens
catgtgtattcagaaagaagtatgtgaatcgaactcctgacctcaaataattcgcccgcc

SEQ ID NO: 21 - DNA, 60 bp, Homo sapiens
taagtgaacacgcaagataaaaatagtatcgaactcctgacctcaaaaaatccaccacct

SEQ ID NO: 22 - DNA, 60 bp, Homo sapiens
ggtgctgaaaataaagataccctttctgtcgaactcctgacctcaattaatccacccacc

SEQ ID NO: 23 - DNA, 60 bp, Homo sapiens
gagtaaggagtttttgttgtcgttgttttcgatctcctgacctccatcatgtcctctctt

SEQ ID NO: 24 - DNA, 60 bp, Homo sapiens
aactaataaacttgatgcagaaggaatttcgaactcctgaccttgtaatctgtccacctt

SEQ ID NO: 25 - DNA, 60 bp, Homo sapiens
agttcctgctatgtataaaatgaaactttcgatctcctgttctcgtgatccacctgcctc

SEQ ID NO: 26 - DNA, 60 bp, Homo sapiens
atactaattaatacgtaacctactaacatcgatctcttgacctcatggtctcccacctca

SEQ ID NO: 27 - DNA, 60 bp, Homo sapiens
ccaaaagcttgcttcatccattgattcatcgaactcctgaccttgtaatctgtccacctt

SEQ ID NO: 28 - DNA, 60 bp, Homo sapiens
aaaggcagaagaaagccctagaagaaggtcgatctcctgacctagtgattggccctcctc

SEQ ID NO: 29 - DNA, 60 bp, Homo sapiens
aggaaacatactatcaacattatagctgtcgaactcctgacctcacgtcaattcataagt

SEQ ID NO: 30 - DNA, 60 bp, Homo sapiens
cctagcaaggcaatctactctgttaaagtcgaactcctgacctctagtgatacacctacc

SEQ ID NO: 31 - DNA, 60 bp, Homo sapiens
tctgaaactgtgatggtagagacagatatcgatctcctgatctcgtgatctaccttcctt

SEQ ID NO: 32 - DNA, 60 bp, Homo sapiens
gaagttattgtcttagcccattgaagcatcgaactcctgacctctagtgatacacctacc

SEQ ID NO: 33 - DNA, 60 bp, Homo sapiens
tattgtccccattttacagaagaagaaatcgatctcctgacctagtgattggccctcctc

SEQ ID NO: 34 - DNA, 60 bp, Homo sapiens
tcatgtacaaaaattaactcaaaatgaatcgaactcctgacctcagaagatttgcctgcc

SEQ ID NO: 35 - DNA, 60 bp, Homo sapiens
tcactcccaagccattgtgttgtctaaatcgaactcctgacctcaactgatttgtccacc

SEQ ID NO: 36 - DNA, 60 bp, Homo sapiens
agctttgagcagcttttatttttacatgtcgaactcctgacctcaggtaatcttcccaca

SEQ ID NO: 37 - DNA, 60 bp, Homo sapiens
tttcatacttttaatcttactaatgttgtcgaactcctgacctcaactgatttgtccacc

SEQ ID NO: 38 - DNA, 60 bp, Homo sapiens
cgaacagatattaattcaacagctgcaatcgatctcctgatctcgtgatctaccttcctt

SEQ ID NO: 39 - DNA, 60 bp, Homo sapiens
ttgattgggatgacattaaatgtataggtcgaactcctgacctacctcaagtgatccatc

SEQ ID NO: 40 - DNA, 60 bp, Homo sapiens
cttgatcaagagggatttaaactgaaattcgaggagtatctttgtggctttctctgtatt

SEQ ID NO: 41 - DNA, 60 bp, Homo sapiens
agtctgcctcttgggagtcatcctgggttcgaggagtatctttgtggctttctctgtatt

SEQ ID NO: 42 - DNA, 60 bp, Homo sapiens
cagtgcttggacagcattctcatgtagttcgatctcctgatctcgtgatctaccttcctt

SEQ ID NO: 43 - DNA, 60 bp, Homo sapiens
aaccctgattttctgatttaacactgattcgaactcctgacctcaggtagtccaactgtc

SEQ ID NO: 44 - DNA, 60 bp, Homo sapiens
ttttgtcctagttgtagcttttataatttcgaactcctgacctcatgtgatttggccgct

SEQ ID NO: 45 - DNA, 60 bp, Homo sapiens
agactcaaccatttgtctaaccaatcaatcgaactcctgacctcagatgattcactcacc

SEQ ID NO: 46 - DNA, 60 bp, Homo sapiens
ttcctaaactttatgactgaaattatcttcgaactcctgatctcaggtgatttacttgcg

SEQ ID NO: 47 - DNA, 60 bp, Homo sapiens
gtgtctgcatctatttttattaagcctttcgaactcctgactttgtgattcgcaaaatat

SEQ ID NO: 48 - DNA, 60 bp, Homo sapiens
accagctcctgtattccactagaagacttcgaactcctgaccttgtgctctgtctgcctc

SEQ ID NO: 49 - DNA, 60 bp, Homo sapiens
tttaaaataacagattatatcaagagcatcgaactcctgacttcaggaaatctgcccgtc

SEQ ID NO: 50 - DNA, 60 bp, Homo sapiens
attctaatattctttaaaaaccataaattcgatctcttgaccttgtgactcacccgcatc

SEQ ID NO: 51 - DNA, 60 bp, Homo sapiens
tgccacctctagaaggaacacagctccttcgatctcctgacctcatgacgtgtccgcctt

SEQ ID NO: 52 - DNA, 60 bp, Homo sapiens
tctcaaaatagccaaaagtctgaaacaatcgaactcccgacctccagtggaagttcacac

SEQ ID NO: 53 - DNA, 60 bp, Homo sapiens
atacacttctatcttggaactattgagatcgaactcctgacctacctcaagtgatccatc

SEQ ID NO: 54 - DNA, 60 bp, Homo sapiens
ctaatttttatgaatatttttaattgattcgaactcctgacctcgtgttccccaggcctc

SEQ ID NO: 55 - DNA, 60 bp, Homo sapiens
attttgttaaatcctttctctgcatcaatcgaactcctgatctcaggtgatttacttgcg

SEQ ID NO: 56 - DNA, 60 bp, Homo sapiens
tttttggaataaatagacattttcctgatcgaactcctgactatagttgatccacccacc

SEQ ID NO: 57 - DNA, 60 bp, Homo sapiens
cggggagccttaccaataacataaatagtcgaactcctgaccctaggtgatcctcctgct

SEQ ID NO: 58 - DNA, 60 bp, Homo sapiens
aataaaaatagaaaacaatccttcaaaatcgatctccttacctcgtaatctgcctgcata

SEQ ID NO: 59 - DNA, 60 bp, Homo sapiens
ttgtaaaatctagtcttctgcttccaagtcgaactcctgagctcaagtcatctacgtgcc

SEQ ID NO: 60 - DNA, 60 bp, Homo sapiens
tttttatttttttgtagacaggctggtctcgaggaagggattctggacagataaaaacaa

SEQ ID NO: 61 - DNA, 60 bp, Homo sapiens
atttaaactatttaataatttgctgtattcgaactcctgacttcaggaaatctgcccgtc

SEQ ID NO: 62 - DNA, 60 bp, Homo sapiens
tgatgctaaggcacagtcagttttacattcgaactcctgacctcaggagttccacccacc

SEQ ID NO: 63 - DNA, 60 bp, Homo sapiens
gagttgggcagatcatgaggtcaggagttcgatctcctgaccttatgatctgcccacctt

SEQ ID NO: 64 - DNA, 60 bp, Homo sapiens
atgaagtgatttacataaagtagcttgatcgaactccagacctcaggagatctgcagtcc

SEQ ID NO: 65 - DNA, 60 bp, Homo sapiens
gataatatttagtgaatatagggctatttcgaactcctgacttgaggtgattcacctgcc

SEQ ID NO: 66 - DNA, 60 bp, Homo sapiens
ctaaaatttttttttttgagacggagcttcgaactcctgaccttatgcaatccacttgcc

SEQ ID NO: 67 - DNA, 60 bp, Homo sapiens
tacaacaatttatttttggtttaaaagctcgaactcctgaccttatataatctgcccacc

SEQ ID NO: 68 - DNA, 60 bp, Homo sapiens
ggagtgcagtatagacgaggactgcaaatcgaactcctgacctcagatgattcactcacc

SEQ ID NO: 69 - DNA, 60 bp, Homo sapiens
ggtggtcacccatagtcatttacttctgtcgaactcctgacctcacattcctgtattttc

SEQ ID NO: 70 - DNA, 60 bp, Homo sapiens
cacgttctggtagttaggaaaattcaaatcgaactcctgacctcattacccacccacctt

SEQ ID NO: 71 - DNA, 60 bp, Homo sapiens
tggggaaaaaaatcatccccgggtgcattcgaactcctgacctcaaatgcacccccacct

SEQ ID NO: 72 - DNA, 60 bp, Homo sapiens
tttacaactgctggtcagccagagtcagtcgaactcctgacctccagaaaaatccgccca

SEQ ID NO: 73 - DNA, 60 bp, Homo sapiens
atttttttatgtgatgtgaggtaagagttcgatctcctgacctcagatgatccatctgcc

SEQ ID NO: 74 - DNA, 60 bp, Homo sapiens
taaatgctcttaattataaaaaattctgtcgaattcctgacctcaggtgttctacctgcc

SEQ ID NO: 75 - DNA, 60 bp, Homo sapiens
ctgttagtgataaatctgtaacagcccttcgaactcctgacatcaaataatccactcgcc

SEQ ID NO: 76 - DNA, 60 bp, Homo sapiens
ttcctatatgcctggaataatgccttagtcgatctccttacctcgtaatctgcctgcata

SEQ ID NO: 77 - DNA, 60 bp, Homo sapiens
ctgtttcatctgatttaaaatacacacttcgaactcctgacctcaggcagtcaccttctt

SEQ ID NO: 78 - DNA, 60 bp, Homo sapiens
gtacagccaaggtggagaactactgaggtcgaactcctgacctcaggtaatcttcccaca

SEQ ID NO: 79 - DNA, 60 bp, Homo sapiens
atcttcttttcttcccccatccatttcatcgaactcctgaccctaggtgatcctcctgct

SEQ ID NO: 80 - DNA, 60 bp, Homo sapiens
cagatgaatcccttgtaacctagatacatcgaactcctgaccacaggtgatctacctaac

SEQ ID NO: 81 - DNA, 60 bp, Homo sapiens
tgtcattcagcaatattcagttttttgatcgaactcctgaccttgtaatctgtccacctt

SEQ ID NO: 82 - DNA, 60 bp, Homo sapiens
ttgatctacagacttagagcaacagccatcgaagtcctgacctcaggtaatcctgctgcc

SEQ ID NO: 83 - DNA, 60 bp, Homo sapiens
gaatcctaatcataaaagggaagttttatcgaactcctgaccttgtaatctgtccacctt

SEQ ID NO: 84 - DNA, 60 bp, Homo sapiens
agatgtatcaaactataaagcagcagcatcgaactcctgacttcaggaaatctgcccgtc

SEQ ID NO: 85 - DNA, 60 bp, Homo sapiens
tataaggcttaagatctcttagagtctatcgaactcatgacctcaggttatcctcctgcc

SEQ ID NO: 86 - DNA, 60 bp, Homo sapiens
atagaaagtatattctattaagaggtactcgagaccagactggataacaaggcaaaaccc

SEQ ID NO: 87 - DNA, 60 bp, Homo sapiens
cctggaaatcagctaggaggccattccttcgatctcctgacctcgtgcgcaagagcaatg

SEQ ID NO: 88 - DNA, 60 bp, Homo sapiens
tgtagacaaaaagtgacagaagcaactttcgaactcctgacttcaggaaatctgcccgtc

SEQ ID NO: 89 - DNA, 60 bp, Homo sapiens
gaaaggtggagaatgaggtgaaaagaagtcgaactcctgacctacctcaagtgatccatc

SEQ ID NO: 90 - DNA, 60 bp, Homo sapiens
tggctgcttttgcactgacacagcagagtcgaactcctgacctcaagtaatctacccacc

SEQ ID NO: 91 - DNA, 60 bp, Homo sapiens
ccaggatgtactacactgaatatctaagtcgaactcctgacctcaggttatccatctgcc

SEQ ID NO: 92 - DNA, 60 bp, Homo sapiens
tggtacccgctattaaaatggtgcttggtcgaactcctgacttcaggaaatctgcccgtc

SEQ ID NO: 93 - DNA, 60 bp, Homo sapiens
caggttgctaaaaatcatttttgcatgatcgaactcctgaccttacgatccacccacctt

SEQ ID NO: 94 - DNA, 60 bp, Homo sapiens
cccccatcatttgacaaaatatcataactcgaactcctgacctcatgatttcctgcctca

SEQ ID NO: 95 - DNA, 60 bp, Homo sapiens
gcacccaagctgggaacctgggaatcattcgatctcctgacctcgtgattacaggtgtga

SEQ ID NO: 96 - DNA, 60 bp, Homo sapiens
caaaacttcttgtgctgtagatgaggaatcgaactcctgacctcaggtaatcttcccaca

SEQ ID NO: 97 - DNA, 60 bp, Homo sapiens
gtgataagttatacagagataaaataagtcgaactcctggacttatgtgatctgcccccc

SEQ ID NO: 98 - DNA, 60 bp, Homo sapiens
cagaaaggctattagaatgctttgaccttcgaattcctgacctcaagtgttgggattaca

SEQ ID NO: 99 - DNA, 60 bp, Homo sapiens
taacaaaacatttaagaagtaaataatatcgatctcttgaccttgtgactcacccgcatc

SEQ ID NO: 100 - DNA, 60 bp, Homo sapiens
tcacatttgaattattcacccaaatgaatcgaactcctgacgtcaggtgatctacctgtc

SEQ ID NO: 101 - DNA, 60 bp, Homo sapiens
gtaagaagtgagtgggaattagaccagctcgatctcctgaccttaagcgatctccccgcc

SEQ ID NO: 102 - DNA, 60 bp, Homo sapiens
actgatatacctatccttattaaggcactcgaactcctgacctcacgtaattctcccacc

SEQ ID NO: 103 - DNA, 60 bp, Homo sapiens
gatacaatttctgtttaagagagtgtaatcgaactcctgacctcactcaggtgatccccc

SEQ ID NO: 104 - DNA, 60 bp, Homo sapiens
atattggaaattattttactctagactttcgaactccttgacctcaggtgatctacctgc

SEQ ID NO: 105 - DNA, 60 bp, Homo sapiens
acttttcttttatgccaattagaataagtcgaactcctgacttcaggaaatctgcccgtc

SEQ ID NO: 106 - DNA, 60 bp, Homo sapiens
tttttcatgggtttttgttttgtttatttcgaacttctgacctcatgatcaacccatctt

SEQ ID NO: 107 - DNA, 60 bp, Homo sapiens
ttccctgactggaacctctagtacaatgtcgaactcctgatctcaggtgatttacttgcg

SEQ ID NO: 108 - DNA, 60 bp, Homo sapiens
aaccccttttatttcctatacatctatttcgaactcctgatctcaggtgatttacttgcg

SEQ ID NO: 109 - DNA, 60 bp, Homo sapiens
ggcttcttctccaatgtgtcatctgctttcgaactcctgacctcaatgtgactcacctgc

SEQ ID NO: 110 - DNA, 60 bp, Homo sapiens
ggatatttggatgtaatgaggagaagcatcgatctcctgacctcatgacgtgtccgcctt

SEQ ID NO: 111 - DNA, 60 bp, Homo sapiens
tatctctgagatgagaatggaaaataaatcgaattcctgacctcttgatctgtctgcctt

SEQ ID NO: 112 - DNA, 60 bp, Homo sapiens
atggtcttcctcaacagtttttctttcatcgaactcgtgacctcaagtggtctccctgcc

SEQ ID NO: 113 - DNA, 60 bp, Homo sapiens
aactgttggggctctaatttatatctgatcgaactcctgacctcactcaggtgatccccc

SEQ ID NO: 114 - DNA, 60 bp, Homo sapiens
aagacagatctggtttttttttgaaatgtcgatttcctgaccttgtgatccaatgccagg

SEQ ID NO: 115 - DNA, 60 bp, Homo sapiens
taaaactgtaaaacactgatgccagaaatcgaactcctgacttcggtgatctacctgccg

SEQ ID NO: 116 - DNA, 60 bp, Homo sapiens
taggcagacttacctaccacagatacagtcgaactcctgacctcatgtgatttggccgct

SEQ ID NO: 117 - DNA, 60 bp, Homo sapiens
tattgtctttcttcagatgtgggctacatcgaactcctgacctcaggtgaataacctgcc

SEQ ID NO: 118 - DNA, 60 bp, Homo sapiens
aatttgaaaagttacacaacatttatagtcgaactactgacctaagtgatccacccacct

SEQ ID NO: 119 - DNA, 60 bp, Homo sapiens
tcagctggggtttcccaagcccttgagatcgaactcctgacctcagaagatttgcctgcc

SEQ ID NO: 120 - DNA, 60 bp, Homo sapiens
ataggtaaaaaaggaactgaaggtaaaatcgaactcctgacctcaagagatctgtcctcc

SEQ ID NO: 121 - DNA, 23 bp, Homo sapiens
gctgccctgaaaatgggagtctg

SEQ ID NO: 122 - DNA, 23 bp, Homo sapiens
ctctctcccttcagcacagccac

SEQ ID NO: 123 - DNA, 26 bp, Homo sapiens
tgccctgaaaatgggagtctgagtta

SEQ ID NO: 124 - DNA, 26 bp, Homo sapiens
ggatgaatgtgacgctttcgttcccc

SEQ ID NO: 125 - DNA, 26 bp, Homo sapiens
gaatgcttctggaacacttcttcaag

SEQ ID NO: 126 - DNA, 26 bp, Homo sapiens
ctgtcccatctgcctaaaaccgttgg

SEQ ID NO: 127 - DNA, 26 bp, Homo sapiens
gcacacagtaagcacgcaataaaatg

SEQ ID NO: 128 - DNA, 26 bp, Homo sapiens
ggataagccacaaggcaactggtctg

SEQ ID NO: 129 - DNA, 26 bp, Homo sapiens
gaaggtggcattctctattgtgtcca

SEQ ID NO: 130 - DNA, 26 bp, Homo sapiens
actgcggaacttcaaaggtcaggtgc

SEQ ID NO: 131 - DNA, 23 bp, Homo sapiens
gggtgaccgagtgagatgatgtc

SEQ ID NO: 132 - DNA, 26 bp, Homo sapiens
accctgtagtcctgggctcaagagat

SEQ ID NO: 133 - DNA, 23 bp, Homo sapiens
gaggaaccaccaggctttggagc

SEQ ID NO: 134 - DNA, 26 bp, Homo sapiens
ggttgggttttctcaataatccatag

SEQ ID NO: 135 - DNA, 23 bp, Homo sapiens
agggtgagggtatgtgggtagtg

SEQ ID NO: 136 - DNA, 23 bp, Homo sapiens
cagccagcagagacaggaagtgc

SEQ ID NO: 137 - DNA, 26 bp, Homo sapiens
gagagttattcctcaagtgctcccac

SEQ ID NO: 138 - DNA, 26 bp, Homo sapiens
cagaacacagtgaacaaccaggcatt

SEQ ID NO: 139 - DNA, 24 bp, Homo sapiens
attctaagttttctctcccacccc

SEQ ID NO: 140 - DNA, 26 bp, Homo sapiens
gaacagggatgggcagaagcagaaaa

SEQ ID NO: 141 - DNA, 26 bp, Homo sapiens
cagggctacagatgctggcaaagttg

SEQ ID NO: 142 - DNA, 26 bp, Homo sapiens
cacaaggcaactggtctgaatgtttc

SEQ ID NO: 143 - DNA, 26 bp, Homo sapiens
ctctggcattggtcaaggtcaaagta

SEQ ID NO: 144 - DNA, 26 bp, Homo sapiens
atagggctggagaggagtaggcagat

SEQ ID NO: 145 - DNA, 25 bp, Homo sapiens
agagcgcacggagatcaccgagcga

SEQ ID NO: 146 - DNA, 24 bp, Homo sapiens
gaggtactggagccgagaggtaac

SEQ ID NO: 147 - DNA, 24 bp, Homo sapiens
tctatcagatcggcgaccatttgt

SEQ ID NO: 148 - DNA, 23 bp, Homo sapiens
tacgatgccgctaagaacctctc

SEQ ID NO: 149 - DNA, 26 bp, Homo sapiens
gaaggaaggtgacttgcttgcccaac

SEQ ID NO: 150 - DNA, 26 bp, Homo sapiens
atgaaatcacacccaagtccctcact

SEQ ID NO: 151 - DNA, 23 bp, Homo sapiens
ggtcgtcgctgacgtttacactc

SEQ ID NO: 152 - DNA, 24 bp, Homo sapiens
tagtctcattataatcgttcgcta

SEQ ID NO: 153 - DNA, 26 bp, Homo sapiens
gggaggaagactgtagttggagacat

SEQ ID NO: 154 - DNA, 26 bp, Homo sapiens
tggagggcttgctatggtctgaatgt

SEQ ID NO: 155 - DNA, 23 bp, Homo sapiens
aggagcctctggagcaaggtcag

SEQ ID NO: 156 - DNA, 23 bp, Homo sapiens
gccatcccctacacaggttctca

SEQ ID NO: 157 - DNA, 26 bp, Homo sapiens
gtaatcaagacagtgctatgctggca

SEQ ID NO: 158 - DNA, 23 bp, Homo sapiens
cctgacccaccaagactgaacca

SEQ ID NO: 159 - DNA, 24 bp, Homo sapiens
ttcagggattgaccaacaccggaa

SEQ ID NO: 160 - DNA, 24 bp, Homo sapiens
aacatctcacttgaagtaatgtat

SEQ ID NO: 161 - DNA, 26 bp, Homo sapiens
ctttactcttatgctctgctctgtgc

SEQ ID NO: 162 - DNA, 26 bp, Homo sapiens
aaacacagatgagttcgggcgtggtg

SEQ ID NO: 163 - DNA, 23 bp, Homo sapiens
taggctgtcctcctcctgtgcca

SEQ ID NO: 164 - DNA, 23 bp, Homo sapiens
tggagaccccaggctaatacagc

SEQ ID NO: 165 - DNA, 23 bp, Homo sapiens
gatgggctgaggtggagtctacc

SEQ ID NO: 166 - DNA, 23 bp, Homo sapiens
ccgcccatctgtaagcccatctc

SEQ ID NO: 167 - DNA, 26 bp, Homo sapiens
ttacctcagacatagaaagtgactgc

SEQ ID NO: 168 - DNA, 26 bp, Homo sapiens
gccacaaggcaactggtctgaatgtt

SEQ ID NO: 169 - DNA, 26 bp, Homo sapiens
tctgtcttgctcgtgatagtagttgg

SEQ ID NO: 170 - DNA, 26 bp, Homo sapiens
gtaggcgttcatcttcacggtaaggc

SEQ ID NO: 171 - DNA, 26 bp, Homo sapiens
cctcaaatcttgtcgggagttcctca

SEQ ID NO: 172 - DNA, 26 bp, Homo sapiens
actgtgaccaaaggaaggaaagccat

SEQ ID NO: 173 - DNA, 26 bp, Homo sapiens
gcaaccccactgaatgaaacggacac

SEQ ID NO: 174 - DNA, 26 bp, Homo sapiens
cacaaggcaactggtctgaatgtttc

SEQ ID NO: 175 - DNA, 24 bp, Homo sapiens
ggtcccagagatgttgacagcctg

SEQ ID NO: 176 - DNA, 23 bp, Homo sapiens
gccatcccctacacaggttctca

SEQ ID NO: 177 - DNA, 26 bp, Homo sapiens
gagttctacctaagtcagaggaggaa

SEQ ID NO: 178 - DNA, 26 bp, Homo sapiens
atagggctggagaggagtaggcagat

SEQ ID NO: 179 - DNA, 23 bp, Homo sapiens
ggctcttgctctgctatgggttg

SEQ ID NO: 180 - DNA, 23 bp, Homo sapiens
ggcgatgcccagcaagagtgaag

SEQ ID NO: 181 - DNA, 26 bp, Homo sapiens
tgttccattgtagacttctcggaggc

SEQ ID NO: 182 - DNA, 26 bp, Homo sapiens
tggagggcttgctatggtctgaatgt

SEQ ID NO: 183 - DNA, 23 bp, Homo sapiens
cccctccctcattcctaccatca

SEQ ID NO: 184 - DNA, 23 bp, Homo sapiens
ggcgatgcccagcaagagtgaag

SEQ ID NO: 185 - DNA, 23 bp, Homo sapiens
gtgccaccctgggctggatgatt

SEQ ID NO: 186 - DNA, 23 bp, Homo sapiens
gcctctggtgcccttttgggttg

SEQ ID NO: 187 - DNA, 24 bp, Homo sapiens
acgacagagtccgtgcacctacca

SEQ ID NO: 188 - DNA, 25 bp, Homo sapiens
ctgacgctgcaaaatttgcaaccag

SEQ ID NO: 189 - DNA, 25 bp, Homo sapiens
aacctctttagtctaagttcagact

SEQ ID NO: 190 - DNA, 25 bp, Homo sapiens
gcagtcttcgcggtaggtcctagtg

SEQ ID NO: 191 - DNA, 25 bp, Homo sapiens
agttggaagtttgtctagatctcag

SEQ ID NO: 192 - DNA, 24 bp, Homo sapiens
agatatctttgatgtcgtgattgg

SEQ ID NO: 193 - DNA, 25 bp, Homo sapiens
attttgtcactagaggacgcacgct

SEQ ID NO: 194 - DNA, 24 bp, Homo sapiens
ctcgagaggaggagacgtcagtcc

SEQ ID NO: 195 - DNA, 24 bp, Homo sapiens
tcaagtgaccattgtgaccaccgc

SEQ ID NO: 196 - DNA, 23 bp, Homo sapiens
ggtggagggcttgctatggtctg

SEQ ID NO: 197 - DNA, 26 bp, Homo sapiens
cgcattcttttgccaacaccacatca

SEQ ID NO: 198 - DNA, 26 bp, Homo sapiens
ctgacccaggaaaaccaccctcattc

SEQ ID NO: 199 - DNA, 24 bp, Homo sapiens
aaggacccttggccctccaccctt

SEQ ID NO: 200 - DNA, 24 bp, Homo sapiens
aggcagtgtatactcttccataaa

SEQ ID NO: 201 - DNA, 26 bp, Homo sapiens
gccctctacttaccaacttctgcctt

SEQ ID NO: 202 - DNA, 26 bp, Homo sapiens
gcattcctgattgcctgatttcaagt

SEQ ID NO: 203 - DNA, 26 bp, Homo sapiens
taggcagaacgctttgagagaagtat

SEQ ID NO: 204 - DNA, 26 bp, Homo sapiens
gtggagggcttgctatggtctgaatg

SEQ ID NO: 205 - DNA, 23 bp, Homo sapiens
tcagtcaccccatccagcctcat

SEQ ID NO: 206 - DNA, 23 bp, Homo sapiens
taagaggacctacgcacccgcag

SEQ ID NO: 207 - DNA, 23 bp, Homo sapiens
tctgttgcgggtctcttgagggc

SEQ ID NO: 208 - DNA, 23 bp, Homo sapiens
tagtgaagccaggtccaggagca

SEQ ID NO: 209 - DNA, 25 bp, Homo sapiens
cgggctattagttatgaggtccgaa

SEQ ID NO: 210 - DNA, 25 bp, Homo sapiens
ccgttactgttggtcgtagagccca

SEQ ID NO: 211 - DNA, 25 bp, Homo sapiens
gattgaaaaaggtgagggaactcgg

SEQ ID NO: 212 - DNA, 25 bp, Homo sapiens
gaacgggttggccagatgtgcgaca

SEQ ID NO: 213 - DNA, 25 bp, Homo sapiens
ccgaacgggaaagacggacatctag

SEQ ID NO: 214 - DNA, 25 bp, Homo sapiens
atatcgcttagtcgctcttgggccg

SEQ ID NO: 215 - DNA, 25 bp, Homo sapiens
gcaacctgaccacggttgcgcgtcc

SEQ ID NO: 216 - DNA, 25 bp, Homo sapiens
cggtgcgctaccttgcaggaattga

SEQ ID NO: 217 - DNA, 26 bp, Homo sapiens
ttactttgccatctgattgtgcttgc

SEQ ID NO: 218 - DNA, 26 bp, Homo sapiens
gacctccagcgagaccactcctaaat

SEQ ID NO: 219 - DNA, 25 bp, Homo sapiens
gaccgtccgttaatttcccttgcat

SEQ ID NO: 220 - DNA, 25 bp, Homo sapiens
aaccgctctcttagaagagagacag

SEQ ID NO: 221 - DNA, 26 bp, Homo sapiens
agggaaagaacttggtttactgctgc

SEQ ID NO: 222 - DNA, 26 bp, Homo sapiens
gaggtggaggtggatttgctcgtatg

SEQ ID NO: 223 - DNA, 26 bp, Homo sapiens
cagaggaaaccatcattgttagtagc

SEQ ID NO: 224 - DNA, 26 bp, Homo sapiens
cccagaacagagaaagggcattaggg

SEQ ID NO: 225 - DNA, 26 bp, Homo sapiens
ggtggtgtgggtgtcattagtaaact

SEQ ID NO: 226 - DNA, 26 bp, Homo sapiens
ctgacccaggaaaaccaccctcattc

SEQ ID NO: 227 - DNA, 26 bp, Homo sapiens
acttctttctctctctgctgactggg

SEQ ID NO: 228 - DNA, 26 bp, Homo sapiens
gggctgaaaagtttgggaagaacagg

SEQ ID NO: 229 - DNA, 26 bp, Homo sapiens
cttgtcctgttcccagtttctgaggg

SEQ ID NO: 230 - DNA, 26 bp, Homo sapiens
ttacaatcgcctcaaagtgctcaagc

SEQ ID NO: 231 - DNA, 23 bp, Homo sapiens
gcctccctcctcatcacttcctc

SEQ ID NO: 232 - DNA, 23 bp, Homo sapiens
ccagcccagcactcttgtaactc

SEQ ID NO: 233 - DNA, 26 bp, Homo sapiens
cctccacccaacagaaaatcctctta

SEQ ID NO: 234 - DNA, 26 bp, Homo sapiens
agacacagccagcagagacaggaagt

SEQ ID NO: 235 - DNA, 25 bp, Homo sapiens
atagcttcttaccggtgcgccaccg

SEQ ID NO: 236 - DNA, 25 bp, Homo sapiens
taggcagtacgatcgcacgccccat

SEQ ID NO: 237 - DNA, 26 bp, Homo sapiens
cctaaggtgagtaatgttgactggct

SEQ ID NO: 238 - DNA, 26 bp, Homo sapiens
cacctgttgtaatcctggcactctgg

SEQ ID NO: 239 - DNA, 23 bp, Homo sapiens
cctgggctcaaccttgctggact

SEQ ID NO: 240 - DNA, 23 bp, Homo sapiens
gggtgaccgagtgagatgatgtc

SEQ ID NO: 241 - DNA, 23 bp, Homo sapiens
tcacccctctgcttccaggacag

SEQ ID NO: 242 - DNA, 23 bp, Homo sapiens
cctccagcgagaccactcctaaa

SEQ ID NO: 243 - DNA, 25 bp, Homo sapiens
gtgaacgattggtaaacccagtgtc

SEQ ID NO: 244 - DNA, 25 bp, Homo sapiens
ctgtgagcgacaaaagcttaaatgg

SEQ ID NO: 245 - DNA, 26 bp, Homo sapiens
tttactgtcttgaaggaggcagggtt

SEQ ID NO: 246 - DNA, 26 bp, Homo sapiens
gcactgaagagaacacagcaaagccg

SEQ ID NO: 247 - DNA, 26 bp, Homo sapiens
gtcctaaaagaatcacagttatgcca

SEQ ID NO: 248 - DNA, 26 bp, Homo sapiens
gcagcgaagaagttgagaagtggaca

SEQ ID NO: 249 - DNA, 25 bp, Homo sapiens
gaaatacgcgcccataacttggtgc

SEQ ID NO: 250 - DNA, 25 bp, Homo sapiens
gaatacgggtcgtagcaatgttcgt

SEQ ID NO: 251 - DNA, 26 bp, Homo sapiens
ccctgtgtgtttcttcccttggctga

SEQ ID NO: 252 - DNA, 26 bp, Homo sapiens
cccacaaaacttgactctcttccatc

SEQ ID NO: 253 - DNA, 26 bp, Homo sapiens
agaggttcatcgtctccaggtcatag

SEQ ID NO: 254 - DNA, 26 bp, Homo sapiens
ttcacacagagaggttgcctggatgt

SEQ ID NO: 255 - DNA, 23 bp, Homo sapiens
tgtctgtctgtccctgtgaccct

SEQ ID NO: 256 - DNA, 23 bp, Homo sapiens
caactcacccagagaccccttgc

SEQ ID NO: 257 - DNA, 26 bp, Homo sapiens
ccaggtagaagtggtttgttacacat

SEQ ID NO: 258 - DNA, 26 bp, Homo sapiens
ctccctcaaatccagacacctaaaga

SEQ ID NO: 259 - DNA, 25 bp, Homo sapiens
ctgactatgatctacatattacagg

SEQ ID NO: 260 - DNA, 25 bp, Homo sapiens
cggtacgtctgctttggtcagcctc

SEQ ID NO: 261 - DNA, 25 bp, Homo sapiens
taatggctcgtaagatagtgcagcc

SEQ ID NO: 262 - DNA, 25 bp, Homo sapiens
gctggtgatcactcgatgacctcgg

SEQ ID NO: 263 - DNA, 23 bp, Homo sapiens
gtcttgtggctgaagtgcccgtt

SEQ ID NO: 264 - DNA, 23 bp, Homo sapiens
ctctccttccagccttcttgggc

SEQ ID NO: 265 - DNA, 25 bp, Homo sapiens
ctccccattgcaactacggggattc

SEQ ID NO: 266 - DNA, 25 bp, Homo sapiens
ttggagagccagctgcgttcgctaa

SEQ ID NO: 267 - DNA, 26 bp, Homo sapiens
gttttccctgttggtatgtagcctgg

SEQ ID NO: 268 - DNA, 26 bp, Homo sapiens
actacgaatgataggctgggcacagt

SEQ ID NO: 269 - DNA, 26 bp, Homo sapiens
cttcagtgtttcctttcagtgatggc

SEQ ID NO: 270 - DNA, 23 bp, Homo sapiens
atgacatttcgggctgggcacgg

SEQ ID NO: 271 - DNA, 25 bp, Homo sapiens
tgtgaggacagtgtagtattagcaa

SEQ ID NO: 272 - DNA, 25 bp, Homo sapiens
acgataagtcccgaactggttgtga

SEQ ID NO: 273 - DNA, 25 bp, Homo sapiens
cctaacgaaaagtgaacttcataat

SEQ ID NO: 274 - DNA, 25 bp, Homo sapiens
tcgaatgcagtgatctcccaggtgc

SEQ ID NO: 275 - DNA, 25 bp, Homo sapiens
acgtgctgtcccacgcacatggtag

SEQ ID NO: 276 - DNA, 25 bp, Homo sapiens
gaatcaaaaatactaggtaactaga

SEQ ID NO: 277 - DNA, 25 bp, Homo sapiens
atttggacaaaattgaatggagtct

SEQ ID NO: 278 - DNA, 25 bp, Homo sapiens
ggatttgcgacgttctaagcgttgg

SEQ ID NO: 279 - DNA, 25 bp, Homo sapiens
gatcaaccttcacaccgatctagaa

SEQ ID NO: 280 - DNA, 25 bp, Homo sapiens
tccatgtgaatcgccatccaggatc

SEQ ID NO: 281 - DNA, 26 bp, Homo sapiens
gccaatgagcaccacatcactatttg

SEQ ID NO: 282 - DNA, 26 bp, Homo sapiens
ggataagccacaaggcaactggtctg

SEQ ID NO: 283 - DNA, 25 bp, Homo sapiens
gcaactctcctcctcagcagtctgg

SEQ ID NO: 284 - DNA, 25 bp, Homo sapiens
tcctagcaaccgggggctgggaatc

SEQ ID NO: 285 - DNA, 25 bp, Homo sapiens
tctatggaaactacaggactaacct

SEQ ID NO: 286 - DNA, 25 bp, Homo sapiens
tgtgacatgagtcaagatatttgct

SEQ ID NO: 287 - DNA, 26 bp, Homo sapiens
gactcatttcagttgttcagaggtcg

SEQ ID NO: 288 - DNA, 26 bp, Homo sapiens
gacctccagcgagaccactcctaaat

SEQ ID NO: 289 - DNA, 25 bp, Homo sapiens
cggtaatctatgctctaggcatcta

SEQ ID NO: 290 - DNA, 25 bp, Homo sapiens
aggactcgtgtcaacgcgcaggctt

SEQ ID NO: 291 - DNA, 26 bp, Homo sapiens
gcacaatgccagaaacatagtagacg

SEQ ID NO: 292 - DNA, 26 bp, Homo sapiens
gggaagaatgaatgacgccgaaggac

SEQ ID NO: 293 - DNA, 23 bp, Homo sapiens
gcccaggacataccacacaccaa

SEQ ID NO: 294 - DNA, 23 bp, Homo sapiens
gccctcactaaagcccacagcgt

SEQ ID NO: 295 - DNA, 23 bp, Homo sapiens
cctccagcacacacacactcagt

SEQ ID NO: 296 - DNA, 23 bp, Homo sapiens
gacctccagcgagaccactccta

SEQ ID NO: 297 - DNA, 26 bp, Homo sapiens
ttagaatgatagttacctgagaccag

SEQ ID NO: 298 - DNA, 26 bp, Homo sapiens
cccaggaaaaccaccctcattcaaac

SEQ ID NO: 299 - DNA, 25 bp, Homo sapiens
tgcgagacaatgctaccttaccggt

SEQ ID NO: 300 - DNA, 25 bp, Homo sapiens
cattccctcatcacaattgaactaa

SEQ ID NO: 301 - DNA, 25 bp, Homo sapiens
cggaactcgatcggttgaactctat

SEQ ID NO: 302 - DNA, 25 bp, Homo sapiens
agggcgcgagacgtattccccggtt

SEQ ID NO: 303 - DNA, 25 bp, Homo sapiens
cacgcctggtcttcgaagttagcac

SEQ ID NO: 304 - DNA, 25 bp, Homo sapiens
gctgcttgggaccataaaacctcat

SEQ ID NO: 305 - DNA, 25 bp, Homo sapiens
atcgagcgggcaatatgtacatatt

SEQ ID NO: 306 - DNA, 25 bp, Homo sapiens
tcaccgcggaacccgactatgcgac

SEQ ID NO: 307 - DNA, 25 bp, Homo sapiens
tacctctacaatggatgcgcaaaaa

SEQ ID NO: 308 - DNA, 25 bp, Homo sapiens
tggacggcctatttaccgagagctg

SEQ ID NO: 309 - DNA, 23 bp, Homo sapiens
ggaagggcacctccactcatcca

SEQ ID NO: 310 - DNA, 23 bp, Homo sapiens
ctggctgtcatccaaccaccact

SEQ ID NO: 311 - DNA, 25 bp, Homo sapiens
ttcgaaggctggttgaatacatggc

SEQ ID NO: 312 - DNA, 25 bp, Homo sapiens
agaagattgaggtgtcctaaactta

SEQ ID NO: 313 - DNA, 25 bp, Homo sapiens
cgcggccataacaccttagccgtct

SEQ ID NO: 314 - DNA, 25 bp, Homo sapiens
cgggggaataagtgacctatgcacc

SEQ ID NO: 315 - DNA, 23 bp, Homo sapiens
tatgtggacctgatgggcacccc

SEQ ID NO: 316 - DNA, 26 bp, Homo sapiens
tgctattatctggtgactggactggg

SEQ ID NO: 317 - DNA, 23 bp, Homo sapiens
tttgaaaagaccgtcgggtgcgg

SEQ ID NO: 318 - DNA, 23 bp, Homo sapiens
tgaagtggcatctctctcccgcc

SEQ ID NO: 319 - DNA, 26 bp, Homo sapiens
cacaagaaaataagtctcccaacctg

SEQ ID NO: 320 - DNA, 26 bp, Homo sapiens
tgactaaaatgttatgtggtgcgtga

SEQ ID NO: 321 - DNA, 23 bp, Homo sapiens
gggtgttgcgagcagcctgaatg

SEQ ID NO: 322 - DNA, 23 bp, Homo sapiens
gggcgataatgctggagacacag

SEQ ID NO: 323 - DNA, 25 bp, Homo sapiens
agacgccgcttgcgatttcgaccaa

SEQ ID NO: 324 - DNA, 25 bp, Homo sapiens
cagcgggaacggctgtgcagtcaca

SEQ ID NO: 325 - DNA, 26 bp, Homo sapiens
gactttgtatgcttggctcttttcaa

SEQ ID NO: 326 - DNA, 26 bp, Homo sapiens
ctgcgtgaagattgggaaaatactct

SEQ ID NO: 327 - DNA, 23 bp, Homo sapiens
tggacagagcacctcctgatagc

SEQ ID NO: 328 - DNA, 23 bp, Homo sapiens
cagtgagatgatgggcaccaggg

SEQ ID NO: 329 - DNA, 23 bp, Homo sapiens
ctcagtagtggctctccttcccc

SEQ ID NO: 330 - DNA, 23 bp, Homo sapiens
cctccagcgagaccactcctaaa

SEQ ID NO: 331 - DNA, 25 bp, Homo sapiens
ccgctgtgtagcggacagtctgagc

SEQ ID NO: 332 - DNA, 25 bp, Homo sapiens
taccctctcaagcacgagatctaca

SEQ ID NO: 333 - DNA, 26 bp, Homo sapiens
cttcttgcttttcaatcaggatgcct

SEQ ID NO: 334 - DNA, 26 bp, Homo sapiens
cctccatctcttgccttctccttagg

SEQ ID NO: 335 - DNA, 25 bp, Homo sapiens
gggcggggtagaagccgtcgcttcg

SEQ ID NO: 336 - DNA, 25 bp, Homo sapiens
ggtccatgcggggggtaaaaccctg

SEQ ID NO: 337 - DNA, 26 bp, Homo sapiens
tttctgataccatctgcgagccctgc

SEQ ID NO: 338 - DNA, 26 bp, Homo sapiens
agtcagggaaataactcactgggaag

SEQ ID NO: 339 - DNA, 23 bp, Homo sapiens
caaggtggtccccgagttgccat

SEQ ID NO: 340 - DNA, 23 bp, Homo sapiens
gaggtggaggtggatttgctcgt

SEQ ID NO: 341 - DNA, 23 bp, Homo sapiens
ccaagatactgccctgggtctcc

SEQ ID NO: 342 - DNA, 23 bp, Homo sapiens
ccccaccctgaccaactgaatca

SEQ ID NO: 343 - DNA, 26 bp, Homo sapiens
tctggcttttgcctgtccttctgatg

SEQ ID NO: 344 - DNA, 26 bp, Homo sapiens
ccactcttgacctcagtttccctgta

SEQ ID NO: 345 - DNA, 25 bp, Homo sapiens
tttaagaggtccgggcagcatacgc

SEQ ID NO: 346 - DNA, 25 bp, Homo sapiens
tgtggtttatgtgctactgtggaga

SEQ ID NO: 347 - DNA, 25 bp, Homo sapiens
gcggcacccatctctcttcattcgc

SEQ ID NO: 348 - DNA, 25 bp, Homo sapiens
gggtttgtgaatctaggagcacaaa

SEQ ID NO: 349 - DNA, 25 bp, Homo sapiens
ttattgtgaacgttcgaaagcacaa

SEQ ID NO: 350 - DNA, 25 bp, Homo sapiens
aaagcggcgcacttcaggcataaaa

SEQ ID NO: 351 - DNA, 23 bp, Homo sapiens
ggcagaatagtctcatccagccc

SEQ ID NO: 352 - DNA, 23 bp, Homo sapiens
tgaagccaggtccaggagcagtg

SEQ ID NO: 353 - DNA, 26 bp, Homo sapiens
ggtttcacagtatggatttggtgttc

SEQ ID NO: 354 - DNA, 26 bp, Homo sapiens
gcctgggtattctactgtcagagatt

SEQ ID NO: 355 - DNA, 26 bp, Homo sapiens
catttacgggagtggtggacaacaca

SEQ ID NO: 356 - DNA, 26 bp, Homo sapiens
ttaggtctgggctcagtgacttatgc

SEQ ID NO: 357 - DNA, 25 bp, Homo sapiens
ggatggatttttgacaatccccgat

SEQ ID NO: 358 - DNA, 25 bp, Homo sapiens
aatgctagggagcaataaacataac

SEQ ID NO: 359 - DNA, 25 bp, Homo sapiens
gtccaagctatggtcccttaacagc

SEQ ID NO: 360 - DNA, 25 bp, Homo sapiens
catccacagtgaattgatccgaagg

SEQ ID NO: 361 - DNA, 60 bp, Homo sapiens
tgattcaagcttgattctggagcttgaatcgaactcctgatcttaggtgatccatccacc

SEQ ID NO: 362 - DNA, 60 bp, Homo sapiens
ttagttcttagatgctttgtcatatgcttcgaactcccgacctccagtggaagttcacac

SEQ ID NO: 363 - DNA, 60 bp, Homo sapiens
tggctttttagaaaaacatttattgtaatcgaactcctgaccacaaattatccaccagac

SEQ ID NO: 364 - DNA, 60 bp, Homo sapiens
aatgcaaataatctcaaggtctacagtttcgaactcctgaccttatgcaatccacttgcc

SEQ ID NO: 365 - DNA, 60 bp, Homo sapiens
attcatgttagaactacatgtagacatttcgatctcgtgacctcttgatcctcccacctc

SEQ ID NO: 366 - DNA, 60 bp, Homo sapiens
gccaaatcttggtcttgatctgtgccaatcgaactcctgacctcaggtaattagcccacc

SEQ ID NO: 367 - DNA, 60 bp, Homo sapiens
aggcactgtgccactcatttaggacccatcgaactcctgacctcagtggatcatcagact

SEQ ID NO: 368 - DNA, 60 bp, Homo sapiens
gcttctagatttttgttttgttttgttttcgaactcctgacctcagttcatccgcctacc

SEQ ID NO: 369 - DNA, 60 bp, Homo sapiens
ttttatttcaatgattgtatattattagtcgaactcctgactttaagtaatctgcccacc

SEQ ID NO: 370 - DNA, 60 bp, Homo sapiens
gccttaacaacaacaaaatggagagttatcgaactcctgacttcaggtgactcacccacc

SEQ ID NO: 371 - DNA, 60 bp, Homo sapiens
tttttatttttttgtagacaggctggtctcgaggtatcacaagtgaatgctgcaaaatga

SEQ ID NO: 372 - DNA, 60 bp, Homo sapiens
gttagccagacatccttgatagatattatcgaactcctgaccctaggtgatcctcctgct

SEQ ID NO: 373 - DNA, 60 bp, Homo sapiens
aagaggaactaactagtcacaaaggccatcgaactcctgacctcacgtaattctcccacc

SEQ ID NO: 374 - DNA, 60 bp, Homo sapiens
ttctgcagaaaaagtgtcaacaatgtagtcgagaccagcctgaggatcataacaaaatcg

SEQ ID NO: 375 - DNA, 60 bp, Homo sapiens
atcctctgagcttttggttcttctcaattcgaactcctgacctcaagctatccatctgcc

SEQ ID NO: 376 - DNA, 60 bp, Homo sapiens
tggattaatagattaggtcagtaaagaatcgaactcctgacctcgtgttccccaggcctc

SEQ ID NO: 377 - DNA, 60 bp, Homo sapiens
ctcttatgcctccattagaatttgacattcgatctcctgacttcgtgatctgtccacctt

SEQ ID NO: 378 - DNA, 60 bp, Homo sapiens
aaatgtaaactgagtgtctattgtacactcgagaccagcctgaacaatatagtgagaccc

SEQ ID NO: 379 - DNA, 60 bp, Homo sapiens
atcatagctactgaagatgtaggcattttcgaactcctgacttcaggaaatctgcccgtc

SEQ ID NO: 380 - DNA, 60 bp, Homo sapiens
tttgtcatttcagggatttgtgtgtgcttcgaactcctgacctcacgtaattctcccacc

SEQ ID NO: 381 - DNA, 60 bp, Homo sapiens
tgatccctggggatacacaaattgccattcgaactcctgacctcagtcaatctgcccacc

SEQ ID NO: 382 - DNA, 60 bp, Homo sapiens
aaaaaattgttaactacatgatggaaaatcgatctcttgacttcatgatccacctgcctt

SEQ ID NO: 383 - DNA, 60 bp, Homo sapiens
ctataataacattaacagctgaaatttatcgaactcctgacctcaggttaccccctgcct

SEQ ID NO: 384 - DNA, 60 bp, Homo sapiens
gcaattttcttatagtgctttgagaacatcgaactcctaacctcaagtaatccacacact

SEQ ID NO: 385 - DNA, 60 bp, Homo sapiens
ctgccaaaagtgaagatccctactatattcgaactcctgacctcaggtaatctatccgcc

SEQ ID NO: 386 - DNA, 60 bp, Homo sapiens
tgtcccttgcatgggacacattgtttcatcgaactcctgacctttggtcatccacctgcc

SEQ ID NO: 387 - DNA, 60 bp, Homo sapiens
ttaggcttctcttcagagttatctctgttcgatctcttgacctcgtactctgcctgcctt

SEQ ID NO: 388 - DNA, 60 bp, Homo sapiens
aaacacagtccatccatttccagacccatcgaactcctgacctcaaaaaatccaccacct

SEQ ID NO: 389 - DNA, 60 bp, Homo sapiens
cttaacaaaccaatgataagtaatgagatcgaactcctggcctcagatgatacatctgct

SEQ ID NO: 390 - DNA, 60 bp, Homo sapiens
tcaagttcatctagtgcagctcttttattcgaactcctgacctcaagaaatctacctgcc

SEQ ID NO: 391 - DNA, 60 bp, Homo sapiens
ttcccccagtcctcataatgaggcttcatcgagaccagcctagcgaatgtggtgaaacct

SEQ ID NO: 392 - DNA, 60 bp, Homo sapiens
atttgttattacctcaatgagagcctagtcgaactcctgacctacctcaagtgatccatc

SEQ ID NO: 393 - DNA, 60 bp, Homo sapiens
ttaaattgacatttgccaaaggctccactcgatctcctgacctccatcatgtcctctctt

SEQ ID NO: 394 - DNA, 60 bp, Homo sapiens
gactaaatactcagtatttacaatctagtcgaactcccgacctccagtggaagttcacac

SEQ ID NO: 395 - DNA, 60 bp, Homo sapiens
cctttagtacagcgagtaatagatatattcgaactcccgacctccagtggaagttcacac

SEQ ID NO: 396 - DNA, 60 bp, Homo sapiens
gtattttttatagatgttctccatgaagtcgaactcctgactgaggtgatccatccgcct

SEQ ID NO: 397 - DNA, 60 bp, Homo sapiens
tatttcatgggtcactgataagttccattcgagaccagcctgtctacaaaaaaataaaaa

SEQ ID NO: 398 - DNA, 60 bp, Homo sapiens
gtcaattgcaagttgtgacaaacccacttcgatctcctgacctccatcatgtcctctctt

SEQ ID NO: 399 - DNA, 60 bp, Homo sapiens
gaattattagattaagaagcaaaggcactcgatctcttgacctcatggtctcccacctca

SEQ ID NO: 400 - DNA, 60 bp, Homo sapiens
cggtttattcattatttaatacatctcatcgagaccagcctgaacaatatagtgagaccc

SEQ ID NO: 401 - DNA, 60 bp, Homo sapiens
tccccaggaacacctggaagctcaggattcgatctcctgacctcatgattcatcctcctt

SEQ ID NO: 402 - DNA, 60 bp, Homo sapiens
attaactatttagtactacccctgattatcgaactcctgacctcaggtaatcttcccaca

SEQ ID NO: 403 - DNA, 60 bp, Homo sapiens
ttgtggcaactcagcacacttaacaacatcgaactcctgacctcaggagttccacccacc

SEQ ID NO: 404 - DNA, 60 bp, Homo sapiens
cctagtattgatagaggaaatattaaattcgaactcctgacttcaggaaatctgcccgtc

SEQ ID NO: 405 - DNA, 60 bp, Homo sapiens
aacttcaataaaatatgtcatttcagtttcgaactcctgacctcaagtcattcccctgcc

SEQ ID NO: 406 - DNA, 60 bp, Homo sapiens
ataccttaagaggagaattgatggaatgtcgatctcttgacatcatgatccacctgcctc

SEQ ID NO: 407 - DNA, 60 bp, Homo sapiens
acagcattgatacccagggattattcattcgaactcctgactgaggtgatccatccgcct

SEQ ID NO: 408 - DNA, 60 bp, Homo sapiens
ttaacaagtgaaataaaatagtaccaattcgaactcctgacctcgtaatctacccgcctc

SEQ ID NO: 409 - DNA, 60 bp, Homo sapiens
ttattaagacaaatatccaacaaagtcatcgaactcctgaccttgtaatctgtccacctt

SEQ ID NO: 410 - DNA, 60 bp, Homo sapiens
aactattgctatagcaatcaaattgctttcgaactcctgacctcaggtagtacacccgtc

SEQ ID NO: 411 - DNA, 60 bp, Homo sapiens
atagtgaaaaatattcaaattcagacaatcgaactcctgacctcaagttatccagccgtc

SEQ ID NO: 412 - DNA, 60 bp, Homo sapiens
aggggtcactgttgattctggagtgttctcgagaaaaatacttttctacagatgtgtcct

SEQ ID NO: 413 - DNA, 60 bp, Homo sapiens
gacttttaacatttgacttagagaagattcgaactcctgacctgatgatccccctacttg

SEQ ID NO: 414 - DNA, 60 bp, Homo sapiens
cactttaaaattatattctttgatgacttcgaactcctgaccgtttctactaaaaataca

SEQ ID NO: 415 - DNA, 60 bp, Homo sapiens
aagtatattttgtagtctttggtatgaatcgagaccatcctggtcaacactgtgaaaacc

SEQ ID NO: 416 - DNA, 60 bp, Homo sapiens
ggagtttcatcattttatcagggtggtctcgaggaatttatccatttcttctagattttc

SEQ ID NO: 417 - DNA, 60 bp, Homo sapiens
actttggttcatttacatctttaattgatcgaactcctgacctcagatcaggtgatctgc

SEQ ID NO: 418 - DNA, 60 bp, Homo sapiens
catttcttaaaagaagacataaaaatggtcgatctcctgatctcgtgatctaccttcctt

SEQ ID NO: 419 - DNA, 60 bp, Homo sapiens
cacatctaaactcctgaaattcttctgttcgaactcctgacctcacgtaattctcccacc

SEQ ID NO: 420 - DNA, 60 bp, Homo sapiens
caaaaatacatttatcagagctaaaaaatcgaactcctgacctcacgtaattctcccacc

SEQ ID NO: 421 - DNA, 60 bp, Homo sapiens
gatagatgataggtgattgttagattgatcgaactcctgacctcacgtaattctcccacc

SEQ ID NO: 422 - DNA, 60 bp, Homo sapiens
agggagattccgtctaaaaaaaaaaatgtcgaactcctgaccttatgatccatccacctc

SEQ ID NO: 423 - DNA, 60 bp, Homo sapiens
caagactctgtctcaagcaaaaaaaaaatcgaactcctgacacctcaggtgatctacctg

SEQ ID NO: 424 - DNA, 60 bp, Homo sapiens
gaaaatctagaagaaatggacaaattcctcgaactcctgacctcacattcctgtattttc

SEQ ID NO: 425 - DNA, 60 bp, Homo sapiens
tagagtagtctcatcttcttataaaacatcgaactcctgacctcaggatttgccagcctc

SEQ ID NO: 426 - DNA, 60 bp, Homo sapiens
gggaaaagttgcaaaaaaaaaaaagcaatcgaactcctgacctcaacagatcctcctgct

SEQ ID NO: 427 - DNA, 60 bp, Homo sapiens
aatgccaacttcagattttagtctcctttcgatctcctgacctccatcatgtcctctctt

SEQ ID NO: 428 - DNA, 60 bp, Homo sapiens
tgtcatctgttcatacaatgctaaaaattcgaactcctgacctcacgtaattctcccacc

SEQ ID NO: 429 - DNA, 60 bp, Homo sapiens
aattaaaacattttgaaaaatgtaagcatcgaactcctgacctgatgatccccctacttg

SEQ ID NO: 430 - DNA, 60 bp, Homo sapiens
gcatattaatttcaagatagcagtcaattcgaactcctgacctcacgtaattctcccacc

SEQ ID NO: 431 - DNA, 60 bp, Homo sapiens
ggcttttgattattcacacaagatatgatcgaactcctgacctgatgatccccctacttg

SEQ ID NO: 432 - DNA, 60 bp, Homo sapiens
tctacacatttattgtgaacttacctcttcgatctcctgatctcgtgatctaccttcctt

SEQ ID NO: 433 - DNA, 60 bp, Homo sapiens
aatttatgttatagcgattacatctagatcgatctcctgaccttgtgtttcacctgcctt

SEQ ID NO: 434 - DNA, 60 bp, Homo sapiens
tcttccatctacagaattttaattagagtcgaactcctgatctcgtgatatgctggcctc

SEQ ID NO: 435 - DNA, 60 bp, Homo sapiens
taactcatttcagcatttcttttttttttcgaactcctgacctcacgtaattctcccacc

SEQ ID NO: 436 - DNA, 60 bp, Homo sapiens
gttgctttaagtgacggagtccacaagatcgaactcctgacctcaagtagttcttccacc

SEQ ID NO: 437 - DNA, 60 bp, Homo sapiens
tagtattcagaaatggggagattattgttcgaactcctgacctcagaagatttgcctgcc

SEQ ID NO: 438 - DNA, 60 bp, Homo sapiens
agtagagaccactttgaccaggctggtctcgaggaatttatccatttcttctagattttc

SEQ ID NO: 439 - DNA, 60 bp, Homo sapiens
cagataggtaagttactaaagaggaaaatcgatctcttgacctcgtactctgcctgcctt

SEQ ID NO: 440 - DNA, 60 bp, Homo sapiens
cattccatatctataccaatgtttcacttcgaactcctgacctgatgatccccctacttg

SEQ ID NO: 441 - DNA, 60 bp, Homo sapiens
aacaccaacttcagattttagtctgctttcgatctcctgacctccatcatgtcctctctt

SEQ ID NO: 442 - DNA, 60 bp, Homo sapiens
tccctgagttatgcagctcttccaaatgtcgaactcctgacctcaggagttccacccacc

SEQ ID NO: 443 - DNA, 60 bp, Homo sapiens
tttattctttctttgtgttataagcaattcgaactcctgacctgatgatccccctacttg

SEQ ID NO: 444 - DNA, 60 bp, Homo sapiens
tgtatttttagtagaaacggtcaggagttcgatggcatatagttgtacactacagtgatt

SEQ ID NO: 445 - DNA, 60 bp, Homo sapiens
agctacctttcaggggaaattatttttttcgatctcctgacctagtgattggccctcctc

SEQ ID NO: 446 - DNA, 60 bp, Homo sapiens
tcattagttgcctggagacaaatttgagtcgaactcctgacctcaaggcccagtcagcct

SEQ ID NO: 447 - DNA, 60 bp, Homo sapiens
tatttatattccttaatgatgtaacttctcgagaccagcctgactgatattgtgaaaccc

SEQ ID NO: 448 - DNA, 60 bp, Homo sapiens
caaaggctctaggtggctgattaaagcatcgatctcttgacctcgtactctgcctgcctt

SEQ ID NO: 449 - DNA, 60 bp, Homo sapiens
aagaggaagttatagttaatggagagtttcgatctcctgaccttgtcattctcccatctc

SEQ ID NO: 450 - DNA, 60 bp, Homo sapiens
aggtgtaaaaaattataaaagtattaattcgatctcctgacctagtgattggccctcctc

SEQ ID NO: 451 - DNA, 60 bp, Homo sapiens
actgaggataccaatgactccagcattctcgagaccagcctgactgatattgtgaaaccc

SEQ ID NO: 452 - DNA, 60 bp, Homo sapiens
atcttagaaacggtaaacatctcaaatatcgaactcctgacctcgcggtctaccagcctt

SEQ ID NO: 453 - DNA, 60 bp, Homo sapiens
aaaataaattaatcccaaacttggttagtcgaactcctgacctgatgatccccctacttg

SEQ ID NO: 454 - DNA, 60 bp, Homo sapiens
gacctaaggattaagaagattaatggagtcgatctcctgacatcgtgatctatccgcctc

SEQ ID NO: 455 - DNA, 60 bp, Homo sapiens
gaatgaaatgtcattcttttttgtttgttcgaactcctgacctcaggtaatcttcccaca

SEQ ID NO: 456 - DNA, 60 bp, Homo sapiens
tcaccctatccaatttttactgctacattcgaactcctgacctcaggatttgccagcctc

SEQ ID NO: 457 - DNA, 60 bp, Homo sapiens
taatttatacaagtagaaaaattctaggtcgaactcctgacctcaaaagatctgctcgct

SEQ ID NO: 458 - DNA, 60 bp, Homo sapiens
gtcttttgccatattagtctgtctggtctcgatgcaaaaatcctcaataaaatactggca

SEQ ID NO: 459 - DNA, 60 bp, Homo sapiens
ctagcaccaaacttctcatttcagactttcgagaccatcctggtcaacactgtgaaaacc

SEQ ID NO: 460 - DNA, 60 bp, Homo sapiens
ttcacaactattcactgcagaaaacaagtcgatctcttgacctcgtactctgcctgcctt

SEQ ID NO: 461 - DNA, 60 bp, Homo sapiens
acatctttttgcttttttgcatttagtgtcgaggagtatctttgtgatgttctctgtatt

SEQ ID NO: 462 - DNA, 60 bp, Homo sapiens
agtaatagacttaaagatgaaaagtcattcgattttagatctttcctgctttctctggta

SEQ ID NO: 463 - DNA, 60 bp, Homo sapiens
tcctgttaagcatattattgatgggctttcgaactcctgatctcgtgatatgctggcctc

SEQ ID NO: 464 - DNA, 60 bp, Homo sapiens
attgattaaaaaaaaagggaagacaacatcgagaccagcctgtccaccatggtggaaccc

SEQ ID NO: 465 - DNA, 60 bp, Homo sapiens
ctcataattggttaacaatgaggttttttcgaactcctgacctgaagggatctgtctgcc

SEQ ID NO: 466 - DNA, 60 bp, Homo sapiens
ataaacctttattttaaaattcttcttttcgattttagatctttcctgctttctctggta

SEQ ID NO: 467 - DNA, 60 bp, Homo sapiens
aaattaatggatattttcctttgaagggtcgaactcctgagctcaagacctcccaaagtg

SEQ ID NO: 468 - DNA, 60 bp, Homo sapiens
ccatccataaggtttttaggaaaaaaactcgagaccatcctggtcaacactgtgaaaacc

SEQ ID NO: 469 - DNA, 60 bp, Homo sapiens
gttttgtcacagtaataaatcaatcagttcgattttagatctttcctgctttctctggta

SEQ ID NO: 470 - DNA, 60 bp, Homo sapiens
tactaaaaattattttatagaatgtccctcgagaccagcctgggtaatattgcaagacac

SEQ ID NO: 471 - DNA, 60 bp, Homo sapiens
tgagattttgtctcaaaaaaaaaaaaagtcgaactcctgacctcagatgattcatctgcc

SEQ ID NO: 472 - DNA, 60 bp, Homo sapiens
ttcaggccacgtggtcccagatgtgaagtcgaactcctgacctcagtgttccacgcacct

SEQ ID NO: 473 - DNA, 60 bp, Homo sapiens
ctttagaagctactctttatatactcgctcgagaccagactggataacaaggcaaaaccc

SEQ ID NO: 474 - DNA, 60 bp, Homo sapiens
acaccatcactttttctttttgatatcatcgaactcctgacctcagatgattcatctgcc

SEQ ID NO: 475 - DNA, 60 bp, Homo sapiens
agcatagatcatacttagtgagaggctttcgaactcctgacctcaaaaaatccaccacct

SEQ ID NO: 476 - DNA, 60 bp, Homo sapiens
agcagaagaaaataagtgaagtctaacatcgaactcatgacctcaggttatcctcctgcc

SEQ ID NO: 477 - DNA, 60 bp, Homo sapiens
tttgcatattgtgactatccagaggcattcgaactcctgactatagttgatccacccacc

SEQ ID NO: 478 - DNA, 60 bp, Homo sapiens
caatgtacaaaaaaagtttttttttttttcgaactcctgacttcaggaaatctgcccgtc

SEQ ID NO: 479 - DNA, 60 bp, Homo sapiens
tgcattgtacatagttagatcgcagagatcgaactcctgacctcatcattcacccacctc

SEQ ID NO: 480 - DNA, 60 bp, Homo sapiens
acacaaataaaataggagtccggtgacctcgagaccatcctggctaatttggtgaaaccc

SEQ ID NO: 481 - DNA, 26 bp, Homo sapiens
gccaaaacaaagtgtcctcatctggg

SEQ ID NO: 482 - DNA, 26 bp, Homo sapiens
aagggtatgggaaaacaggcatctgc

SEQ ID NO: 483 - DNA, 26 bp, Homo sapiens
gagtctcacttagaacctgctactgt

SEQ ID NO: 484 - DNA, 26 bp, Homo sapiens
cccagaacagagaaagggcattaggg

SEQ ID NO: 485 - DNA, 25 bp, Homo sapiens
gggtcggcatcggaagcttgaaatt

SEQ ID NO: 486 - DNA, 25 bp, Homo sapiens
gagaagcggggagttaccggtcaat

SEQ ID NO: 487 - DNA, 26 bp, Homo sapiens
aacaccaactccttccccattctaat

SEQ ID NO: 488 - DNA, 26 bp, Homo sapiens
ggacccacaaaacttgactctcttcc

SEQ ID NO: 489 - DNA, 25 bp, Homo sapiens
acgagcatacagacaatcgtcgtcg

SEQ ID NO: 490 - DNA, 25 bp, Homo sapiens
atactctccagccgactgaaaacgg

SEQ ID NO: 491 - DNA, 26 bp, Homo sapiens
atgggaactccagacaccaatggctg

SEQ ID NO: 492 - DNA, 26 bp, Homo sapiens
aaacctaccgctttgacctcacagaa

SEQ ID NO: 493 - DNA, 23 bp, Homo sapiens
tctcacccctactcccacctcac

SEQ ID NO: 494 - DNA, 23 bp, Homo sapiens
gaagacacagcagaggacacagc

SEQ ID NO: 495 - DNA, 23 bp, Homo sapiens
ccagagtgagtcaaggaggcacg

SEQ ID NO: 496 - DNA, 23 bp, Homo sapiens
tttcaggcgtccctttcccttgc

SEQ ID NO: 497 - DNA, 26 bp, Homo sapiens
ctgacccattttccctctcctgtgat

SEQ ID NO: 498 - DNA, 26 bp, Homo sapiens
gcaggaacaacagaaagtagaaacag

SEQ ID NO: 499 - DNA, 23 bp, Homo sapiens
agggatggtggctcaatgctgcc

SEQ ID NO: 500 - DNA, 23 bp, Homo sapiens
cctggagaaaacttgctgccgag

SEQ ID NO: 501 - DNA, 25 bp, Homo sapiens
gagaaaaaaccactggaaatggcag

SEQ ID NO: 502 - DNA, 25 bp, Homo sapiens
taccagctcgacattcgcgtgcccc

SEQ ID NO: 503 - DNA, 23 bp, Homo sapiens
tcctggacagtcagcaaacctgc

SEQ ID NO: 504 - DNA, 23 bp, Homo sapiens
cagccagcagagacaggaagtgc

SEQ ID NO: 505 - DNA, 23 bp, Homo sapiens
gtcagaggcaaggaggaaggacc

SEQ ID NO: 506 - DNA, 23 bp, Homo sapiens
gcggaacttcaaaggtcaggtgc

SEQ ID NO: 507 - DNA, 23 bp, Homo sapiens
tcagacagccttcccaagccctg

SEQ ID NO: 508 - DNA, 23 bp, Homo sapiens
acacactttcactccctgtcccc

SEQ ID NO: 509 - DNA, 26 bp, Homo sapiens
tctgtaacaccaagtggaaagcagtg

SEQ ID NO: 510 - DNA, 25 bp, Homo sapiens
taaaagcaggaactggctgggcgtg

SEQ ID NO: 511 - DNA, 25 bp, Homo sapiens
cggccaaccgttcattggagcaata

SEQ ID NO: 512 - DNA, 25 bp, Homo sapiens
gctaggcaacagctggatctacaga

SEQ ID NO: 513 - DNA, 25 bp, Homo sapiens
agtggatggatgagcgccacatgta

SEQ ID NO: 514 - DNA, 25 bp, Homo sapiens
agcgcgattgtcgggcacattagat

SEQ ID NO: 515 - DNA, 25 bp, Homo sapiens
ttgcctaatgggcctctttggtcat

SEQ ID NO: 516 - DNA, 25 bp, Homo sapiens
taagtcacagtgacagcttctactt

SEQ ID NO: 517 - DNA, 26 bp, Homo sapiens
ccttaggattttctcaacaagccatt

SEQ ID NO: 518 - DNA, 26 bp, Homo sapiens
cctccagcgagaccactcctaaataa

SEQ ID NO: 519 - DNA, 23 bp, Homo sapiens
cacctcaactccaagaaggcggg

SEQ ID NO: 520 - DNA, 23 bp, Homo sapiens
gcggaacttcaaaggtcaggtgc

SEQ ID NO: 521 - DNA, 23 bp, Homo sapiens
ccagatgctcccaatcccagtca

SEQ ID NO: 522 - DNA, 23 bp, Homo sapiens
tagtggattcctggctgggcacg

SEQ ID NO: 523 - DNA, 23 bp, Homo sapiens
aacccaaccgtccagagtccacg

SEQ ID NO: 524 - DNA, 23 bp, Homo sapiens
cctgtggaaggtgggactatgag

SEQ ID NO: 525 - DNA, 25 bp, Homo sapiens
ggctaggtcgtcgtgcgctccgtct

SEQ ID NO: 526 - DNA, 25 bp, Homo sapiens
gtacgcaggggaccagtcgatagct

SEQ ID NO: 527 - DNA, 26 bp, Homo sapiens
accctgtagtcctgggctcaagagat

SEQ ID NO: 528 - DNA, 26 bp, Homo sapiens
tgcccaataaaagaaaccatcaaggg

SEQ ID NO: 529 - DNA, 23 bp, Homo sapiens
gggaggcacaggaagggaagttg

SEQ ID NO: 530 - DNA, 23 bp, Homo sapiens
gctgcctaagggtctctttggtc

SEQ ID NO: 531 - DNA, 23 bp, Homo sapiens
gagcagagtgaggactggaatcc

SEQ ID NO: 532 - DNA, 23 bp, Homo sapiens
cctgggctcaaccttgctggact

SEQ ID NO: 533 - DNA, 26 bp, Homo sapiens
gtatcagaggtaatcaagtaaccaag

SEQ ID NO: 534 - DNA, 26 bp, Homo sapiens
attacctcatttatgcctcacaccat

SEQ ID NO: 535 - DNA, 26 bp, Homo sapiens
gctacggttcacaaggtgcttagaaa

SEQ ID NO: 536 - DNA, 23 bp, Homo sapiens
gggaaggaaaagagggcaagtcc

SEQ ID NO: 537 - DNA, 23 bp, Homo sapiens
cctgacccaccaagactgaacca

SEQ ID NO: 538 - DNA, 23 bp, Homo sapiens
gtgccaccctgggctggatgatt

SEQ ID NO: 539 - DNA, 23 bp, Homo sapiens
gcctctggtgcccttttgggttg

SEQ ID NO: 540 - DNA, 23 bp, Homo sapiens
gagcagagtgaggactggaatcc

SEQ ID NO: 541 - DNA, 23 bp, Homo sapiens
aggctaccttgacgctcaccctg

SEQ ID NO: 542 - DNA, 23 bp, Homo sapiens
ggagtaggtggagcccaaaggat

SEQ ID NO: 543 - DNA, 23 bp, Homo sapiens
caccagggtatttcccagcagcc

SEQ ID NO: 544 - DNA, 23 bp, Homo sapiens
ctgacccaggaaaaccaccctca

SEQ ID NO: 545 - DNA, 26 bp, Homo sapiens
gaccttcaatacccaaagtaagcctt

SEQ ID NO: 546 - DNA, 26 bp, Homo sapiens
ctgtcccatctgcctaaaaccgttgg

SEQ ID NO: 547 - DNA, 23 bp, Homo sapiens
catctccctcccctcctttcagc

SEQ ID NO: 548 - DNA, 23 bp, Homo sapiens
gctgtcactcccaagagaagcct

SEQ ID NO: 549 - DNA, 26 bp, Homo sapiens
aatcttgctactgcccattagaaagg

SEQ ID NO: 550 - DNA, 26 bp, Homo sapiens
cccagaacagagaaagggcattaggg

SEQ ID NO: 551 - DNA, 24 bp, Homo sapiens
gggatgtccttgcttgttcctgat

SEQ ID NO: 552 - DNA, 26 bp, Homo sapiens
gattccaaaggtccgaaagcaacggg

SEQ ID NO: 553 - DNA, 23 bp, Homo sapiens
ccatctgctccaggtatgaccct

SEQ ID NO: 554 - DNA, 23 bp, Homo sapiens
cctgggctcaaccttgctggact

SEQ ID NO: 555 - DNA, 26 bp, Homo sapiens
ggacctgaatcttccactctgtcttt

SEQ ID NO: 556 - DNA, 26 bp, Homo sapiens
ctgtcccatctgcctaaaaccgttgg

SEQ ID NO: 557 - DNA, 26 bp, Homo sapiens
tacctctcctctccccgcaaaacact

SEQ ID NO: 558 - DNA, 26 bp, Homo sapiens
actgtgaccaaaggaaggaaagccat

SEQ ID NO: 559 - DNA, 26 bp, Homo sapiens
ggcagtgaataacctgtggaaagatt

SEQ ID NO: 560 - DNA, 24 bp, Homo sapiens
cacccagtcacccaggcttgtgta

SEQ ID NO: 561 - DNA, 25 bp, Homo sapiens
acagccccatctcagggataggttc

SEQ ID NO: 562 - DNA, 26 bp, Homo sapiens
ataaaagtggttgtattggctgggcg

SEQ ID NO: 563 - DNA, 26 bp, Homo sapiens
gcatcctaagaaagtcactatgtgct

SEQ ID NO: 564 - DNA, 26 bp, Homo sapiens
gtcacctttcgtcttttccatttccc

SEQ ID NO: 565 - DNA, 26 bp, Homo sapiens
cacatctcaggtctacgcctctcaag

SEQ ID NO: 566 - DNA, 26 bp, Homo sapiens
cagaacacagtgaacaaccaggcatt

SEQ ID NO: 567 - DNA, 26 bp, Homo sapiens
gatgtggtcagttgtaggagcagact

SEQ ID NO: 568 - DNA, 26 bp, Homo sapiens
cctccagcgagaccactcctaaataa

SEQ ID NO: 569 - DNA, 26 bp, Homo sapiens
gacaagatagttttggattgccacca

SEQ ID NO: 570 - DNA, 26 bp, Homo sapiens
gggaagaaaagatggaagtgggtcat

SEQ ID NO: 571 - DNA, 26 bp, Homo sapiens
ggtggtaaacatttggcttttcccag

SEQ ID NO: 572 - DNA, 26 bp, Homo sapiens
aatacagcggagtcagggaggcaaga

SEQ ID NO: 573 - DNA, 26 bp, Homo sapiens
gttaccagcaaatcttccatcagttc

SEQ ID NO: 574 - DNA, 26 bp, Homo sapiens
gattccaaaggtccgaaagcaacggg

SEQ ID NO: 575 - DNA, 26 bp, Homo sapiens
ctcaagtcaagagaggagacagccat

SEQ ID NO: 576 - DNA, 26 bp, Homo sapiens
ccagagacaggttgaggagtagaaag

SEQ ID NO: 577 - DNA, 24 bp, Homo sapiens
tgtcaagcgggggcctcaagttat

SEQ ID NO: 578 - DNA, 23 bp, Homo sapiens
gaaggacggaaaccagaattact

SEQ ID NO: 579 - DNA, 24 bp, Homo sapiens
cgcggcatctaattttagtgtatt

SEQ ID NO: 580 - DNA, 23 bp, Homo sapiens
ttgactgcgagttcgctactagt

SEQ ID NO: 581 - DNA, 24 bp, Homo sapiens
ccgactgcccttgtccaatggtgg

SEQ ID NO: 582 - DNA, 25 bp, Homo sapiens
acccgatgagttgccgacttttagg

SEQ ID NO: 583 - DNA, 23 bp, Homo sapiens
gctgccctgaaaatgggagtctg

SEQ ID NO: 584 - DNA, 23 bp, Homo sapiens
ggcagatgggaagcagcgtccta

SEQ ID NO: 585 - DNA, 25 bp, Homo sapiens
gcgtgatagactatgcactagggtc

SEQ ID NO: 586 - DNA, 24 bp, Homo sapiens
acggcctatttaccgagagctgtt

SEQ ID NO: 587 - DNA, 23 bp, Homo sapiens
ttcagagccggtagatgtatggc

SEQ ID NO: 588 - DNA, 24 bp, Homo sapiens
gaaggctggttgaatacatggcag

SEQ ID NO: 589 - DNA, 23 bp, Homo sapiens
tacgtgtacgagctcctgcagga

SEQ ID NO: 590 - DNA, 23 bp, Homo sapiens
agattgaggtgtcctaaacttac

SEQ ID NO: 591 - DNA, 23 bp, Homo sapiens
tcaaatcgcatccgccgtgcaca

SEQ ID NO: 592 - DNA, 24 bp, Homo sapiens
cggccataacaccttagccgtctc

SEQ ID NO: 593 - DNA, 25 bp, Homo sapiens
gagatcgggcacagatgtgacttct

SEQ ID NO: 594 - DNA, 25 bp, Homo sapiens
ggggaataagtgacctatgcaccag

SEQ ID NO: 595 - DNA, 23 bp, Homo sapiens
gcgcacgacgtcctgatccaccc

SEQ ID NO: 596 - DNA, 23 bp, Homo sapiens
cgccgcttgcgatttcgaccaac

SEQ ID NO: 597 - DNA, 23 bp, Homo sapiens
attccgcctatacggatgcgttc

SEQ ID NO: 598 - DNA, 23 bp, Homo sapiens
gcgggaacggctgtgcagtcaca

SEQ ID NO: 599 - DNA, 24 bp, Homo sapiens
catacctatcccgaatgcttaagt

SEQ ID NO: 600 - DNA, 23 bp, Homo sapiens
cgctgtgtagcggacagtctgag

SEQ ID NO: 601 - DNA, 23 bp, Homo sapiens
agggagttacaggctttcagtaa

SEQ ID NO: 602 - DNA, 24 bp, Homo sapiens
taccctctcaagcacgagatctac

SEQ ID NO: 603 - DNA, 25 bp, Homo sapiens
cttaaagtgatgcaggtacatccat

SEQ ID NO: 604 - DNA, 23 bp, Homo sapiens
gggcggggtagaagccgtcgctt

SEQ ID NO: 605 - DNA, 24 bp, Homo sapiens
gtggagtgtttaacactaccttcc

SEQ ID NO: 606 - DNA, 23 bp, Homo sapiens
gggtccatgcggggggtaaaacc

SEQ ID NO: 607 - DNA, 25 bp, Homo sapiens
ggtgtctcgtgcacaccctggtagc

SEQ ID NO: 608 - DNA, 24 bp, Homo sapiens
tgtttaagaggtccgggcagcata

SEQ ID NO: 609 - DNA, 26 bp, Homo sapiens
acctggaaaccctcctgctgaaatag

SEQ ID NO: 610 - DNA, 26 bp, Homo sapiens
aaatctggactctgccttcttggagc

SEQ ID NO: 611 - DNA, 23 bp, Homo sapiens
ccgctctctcttctgtgtcttgg

SEQ ID NO: 612 - DNA, 23 bp, Homo sapiens
ggtcagtgtggcaaagtgggagc

SEQ ID NO: 613 - DNA, 24 bp, Homo sapiens
ccctgctacagatgatgctgcctg

SEQ ID NO: 614 - DNA, 23 bp, Homo sapiens
cagggtctgtcccatctgcctaa

SEQ ID NO: 615 - DNA, 26 bp, Homo sapiens
cccagcagcaactgtttatcagcaat

SEQ ID NO: 616 - DNA, 26 bp, Homo sapiens
actgcggaacttcaaaggtcaggtgc

SEQ ID NO: 617 - DNA, 24 bp, Homo sapiens
gcgcggcacccatctctcttcatt

SEQ ID NO: 618 - DNA, 24 bp, Homo sapiens
aaaaaagcggcgcacttcaggcat

SEQ ID NO: 619 - DNA, 23 bp, Homo sapiens
gcttattgtgaacgttcgaaagc

SEQ ID NO: 620 - DNA, 23 bp, Homo sapiens
aaaggatggatttttgacaatcc

SEQ ID NO: 621 - DNA, 23 bp, Homo sapiens
caatgtggtttatgtgctactgt

SEQ ID NO: 622 - DNA, 23 bp, Homo sapiens
cgatgtccaagctatggtccctt

SEQ ID NO: 623 - DNA, 25 bp, Homo sapiens
gagagggtttgtgaatctaggagca

SEQ ID NO: 624 - DNA, 23 bp, Homo sapiens
acagcaatgctagggagcaataa

SEQ ID NO: 625 - DNA, 26 bp, Homo sapiens
ccgtgctttgaaaatccccagatgtc

SEQ ID NO: 626 - DNA, 26 bp, Homo sapiens
attctcactcccctaccttcagtctg

SEQ ID NO: 627 - DNA, 25 bp, Homo sapiens
cgtcgatactctccagccgactgaa

SEQ ID NO: 628 - DNA, 25 bp, Homo sapiens
acagaagcgcgattgtcgggcacat

SEQ ID NO: 629 - DNA, 23 bp, Homo sapiens
acgggagaaaaaaccactggaaa

SEQ ID NO: 630 - DNA, 25 bp, Homo sapiens
agattatagtgttgaaaaagtcctt

SEQ ID NO: 631 - DNA, 25 bp, Homo sapiens
ggcagtaccagctcgacattcgcgt

SEQ ID NO: 632 - DNA, 25 bp, Homo sapiens
ttcgacggcgtggggagtctctcca

SEQ ID NO: 633 - DNA, 24 bp, Homo sapiens
cccccggccaaccgttcattggag

SEQ ID NO: 634 - DNA, 23 bp, Homo sapiens
cgtgatttacggacgcgaattta

SEQ ID NO: 635 - DNA, 24 bp, Homo sapiens
aataagtggatggatgagcgccac

SEQ ID NO: 636 - DNA, 23 bp, Homo sapiens
acataagtcacagtgacagcttc

SEQ ID NO: 637 - DNA, 23 bp, Homo sapiens
tgtattgcctaatgggcctcttt

SEQ ID NO: 638 - DNA, 25 bp, Homo sapiens
acttggctaggtcgtcgtgcgctcc

SEQ ID NO: 639 - DNA, 24 bp, Homo sapiens
gtcatgctaggcaacagctggatc

SEQ ID NO: 640 - DNA, 25 bp, Homo sapiens
tctgtacgcaggggaccagtcgata

SEQ ID NO: 641 - DNA, 24 bp, Homo sapiens
ccctgctacagatgatgctgcctg

SEQ ID NO: 642 - DNA, 23 bp, Homo sapiens
cagggtctgtcccatctgcctaa

SEQ ID NO: 643 - DNA, 24 bp, Homo sapiens
ctgctcctatagggcgtaatgaca

SEQ ID NO: 644 - DNA, 24 bp, Homo sapiens
cttcttgttgggacggctttcgtt

SEQ ID NO: 645 - DNA, 23 bp, Homo sapiens
ccacatatcacgtggtacaaggt

SEQ ID NO: 646 - DNA, 25 bp, Homo sapiens
agacgttctctttccatttggatca

SEQ ID NO: 647 - DNA, 24 bp, Homo sapiens
attcgtgtccgcgggcaccttgaa

SEQ ID NO: 648 - DNA, 25 bp, Homo sapiens
ttcggaccgcttccgtggccgtgag

SEQ ID NO: 649 - DNA, 24 bp, Homo sapiens
cctggcaaagccttgggatacagc

SEQ ID NO: 650 - DNA, 23 bp, Homo sapiens
gccatcccctacacaggttctca

SEQ ID NO: 651 - DNA, 24 bp, Homo sapiens
catcaccggccggtgctaaaacca

SEQ ID NO: 652 - DNA, 25 bp, Homo sapiens
cgcagcttcagttacgggggcgaat

SEQ ID NO: 653 - DNA, 24 bp, Homo sapiens
aagttgtggcccatactcgtttac

SEQ ID NO: 654 - DNA, 23 bp, Homo sapiens
gtaactccaccacagagtacgac

SEQ ID NO: 655 - DNA, 25 bp, Homo sapiens
gggtgacctgggcggaggctgccct

SEQ ID NO: 656 - DNA, 24 bp, Homo sapiens
atttgcgatggaacttggagtcta

SEQ ID NO: 657 - DNA, 25 bp, Homo sapiens
cgttgacgcaatataggagaggaaa

SEQ ID NO: 658 - DNA, 23 bp, Homo sapiens
gagggtttcctaacgtgccttgc

SEQ ID NO: 659 - DNA, 23 bp, Homo sapiens
ctggtatagagattttgcaggta

SEQ ID NO: 660 - DNA, 23 bp, Homo sapiens
tgtagctacctgacaggaactga

SEQ ID NO: 661 - DNA, 24 bp, Homo sapiens
gatgctgctgggcagtcaccctcc

SEQ ID NO: 662 - DNA, 23 bp, Homo sapiens
tcctcggtcgtagcccttatatt

SEQ ID NO: 663 - DNA, 24 bp, Homo sapiens
acaccccacgatacaaaaacaagt

SEQ ID NO: 664 - DNA, 24 bp, Homo sapiens
gctcagtacgattgacgtttgctc

SEQ ID NO: 665 - DNA, 25 bp, Homo sapiens
accgcacaatcttaggggatacttc

SEQ ID NO: 666 - DNA, 23 bp, Homo sapiens
cggtttgtaacggtgcggatacc

SEQ ID NO: 667 - DNA, 23 bp, Homo sapiens
gttgctctaggacaccgagcaaa

SEQ ID NO: 668 - DNA, 24 bp, Homo sapiens
gacaactccatctgcttcttccgt

SEQ ID NO: 669 - DNA, 25 bp, Homo sapiens
ttgacaacgggccgttgggagcaaa

SEQ ID NO: 670 - DNA, 25 bp, Homo sapiens
cgtggcaaacatgaaacaagctcca

SEQ ID NO: 671 - DNA, 23 bp, Homo sapiens
ccccaccgagacacttgtgactc

SEQ ID NO: 672 - DNA, 23 bp, Homo sapiens
tctggactctgccttcttggagc

SEQ ID NO: 673 - DNA, 23 bp, Homo sapiens
agatttcaagtccgtaggctcag

SEQ ID NO: 674 - DNA, 24 bp, Homo sapiens
cgtattccgggtcctgtcggtagg

SEQ ID NO: 675 - DNA, 24 bp, Homo sapiens
ctttaaagactgcactactagtca

SEQ ID NO: 676 - DNA, 23 bp, Homo sapiens
ttctagcctacccttaagcttgt

SEQ ID NO: 677 - DNA, 25 bp, Homo sapiens
tgtatccatggtatctgtacgtttg

SEQ ID NO: 678 - DNA, 24 bp, Homo sapiens
gtgtgcgtactcgttgaaggtggg

SEQ ID NO: 679 - DNA, 24 bp, Homo sapiens
tatcagaagcccccgaaactaggt

SEQ ID NO: 680 - DNA, 23 bp, Homo sapiens
tgaggatcaacagacctctgtat

SEQ ID NO: 681 - DNA, 25 bp, Homo sapiens
ccgcttgcgaccgtttagatgtttc

SEQ ID NO: 682 - DNA, 25 bp, Homo sapiens
accgagggcagcaccgtgtaacttc

SEQ ID NO: 683 - DNA, 23 bp, Homo sapiens
gaacagggctgttcgcgtgatac

SEQ ID NO: 684 - DNA, 24 bp, Homo sapiens
aggacatctatggggatacatagg

SEQ ID NO: 685 - DNA, 25 bp, Homo sapiens
tcgtaaacctagatagtcaaccatg

SEQ ID NO: 686 - DNA, 24 bp, Homo sapiens
tatggaggtcaagtgctgtaattt

SEQ ID NO: 687 - DNA, 25 bp, Homo sapiens
ctagtatttgtcacgtcctgtatga

SEQ ID NO: 688 - DNA, 23 bp, Homo sapiens
attcacttggcgtccccgttgcg

SEQ ID NO: 689 - DNA, 26 bp, Homo sapiens
cagttttgatttccttttctgacctc

SEQ ID NO: 690 - DNA, 26 bp, Homo sapiens
gttctgtttcttgaccagtgtgttga

SEQ ID NO: 691 - DNA, 23 bp, Homo sapiens
aaagatgtcgtgctactccatac

SEQ ID NO: 692 - DNA, 25 bp, Homo sapiens
aggcctccacctaccgatacatgag

SEQ ID NO: 693 - DNA, 25 bp, Homo sapiens
cgggagatctagtaaaggatgaaat

SEQ ID NO: 694 - DNA, 24 bp, Homo sapiens
tgtcccctcccgcatgcaagcgat

SEQ ID NO: 695 - DNA, 23 bp, Homo sapiens
aaatggggcgaaattacgctgcc

SEQ ID NO: 696 - DNA, 25 bp, Homo sapiens
ataggaattcagaggctttaaggtg

SEQ ID NO: 697 - DNA, 25 bp, Homo sapiens
tgctcgtcctacgagtggtagagtt

SEQ ID NO: 698 - DNA, 24 bp, Homo sapiens
gtggcgcgtttttaaacaccgtcc

SEQ ID NO: 699 - DNA, 24 bp, Homo sapiens
cgtgtaaccccgacccagcaacgt

SEQ ID NO: 700 - DNA, 25 bp, Homo sapiens
cagtcggcctaccgtccgctcccaa

SEQ ID NO: 701 - DNA, 23 bp, Homo sapiens
tatttagcaggagtcgcactcag

SEQ ID NO: 702 - DNA, 23 bp, Homo sapiens
tatgttactgtcagaggggcaca

SEQ ID NO: 703 - DNA, 24 bp, Homo sapiens
ggttaatgatgggttcagctctaa

SEQ ID NO: 704 - DNA, 24 bp, Homo sapiens
taataatatacggggcatagtata

SEQ ID NO: 705 - DNA, 26 bp, Homo sapiens
cttgacagccctctttgtggttactc

SEQ ID NO: 706 - DNA, 26 bp, Homo sapiens
gaatgacgccgaaggactttgtatcc

SEQ ID NO: 707 - DNA, 25 bp, Homo sapiens
tagtctgttacgctggcctctatat

SEQ ID NO: 708 - DNA, 25 bp, Homo sapiens
tgacttctagcgcacgacgtcctga

SEQ ID NO: 709 - DNA, 25 bp, Homo sapiens
gaagtattcgcatgcgcaaccccac

SEQ ID NO: 710 - DNA, 25 bp, Homo sapiens
ccaccccattccgcctatacggatg

SEQ ID NO: 711 - DNA, 25 bp, Homo sapiens
agccaagcgtggttgtacttcgcca

SEQ ID NO: 712 - DNA, 23 bp, Homo sapiens
gttcccatacctatcccgaatgc

SEQ ID NO: 713 - DNA, 24 bp, Homo sapiens
acctgtccttgtggtttgcctaac

SEQ ID NO: 714 - DNA, 25 bp, Homo sapiens
taagtaagggagttacaggctttca

SEQ ID NO: 715 - DNA, 24 bp, Homo sapiens
agtacctgcagtttagtattaact

SEQ ID NO: 716 - DNA, 25 bp, Homo sapiens
taatcttaaagtgatgcaggtacat

SEQ ID NO: 717 - DNA, 24 bp, Homo sapiens
cgaatgctacgccgttacctcagc

SEQ ID NO: 718 - DNA, 24 bp, Homo sapiens
catcgtggagtgtttaacactacc

SEQ ID NO: 719 - DNA, 25 bp, Homo sapiens
ttggtacatgcagcaaacactcagt

SEQ ID NO: 720 - DNA, 25 bp, Homo sapiens
tcctggtgtctcgtgcacaccctgg

SEQ ID NO: 721 - DNA, 60 bp, Homo sapiens
tttaatgggcaactctgaaggattatgttcgaactcctgaccttgtgttcaacccacctc

SEQ ID NO: 722 - DNA, 60 bp, Homo sapiens
ataaaaattaaatttagtcacagtacattcgaactcctgacctcaggtgcttcacctgct

SEQ ID NO: 723 - DNA, 60 bp, Homo sapiens
aaaaagaaaaagaaaaacagaacaaacatcgaactcctgacctcagatgattcatctgcc

SEQ ID NO: 724 - DNA, 60 bp, Homo sapiens
atgatgggggaaataattcaaaactgactcgagaccatcctggtcaacactgtgaaaacc

SEQ ID NO: 725 - DNA, 60 bp, Homo sapiens
tccatcaactgtgatgcagtttccctcttcgatctcctgacctcaagatccaccaacctc

SEQ ID NO: 726 - DNA, 60 bp, Homo sapiens
ggaacacttctctaagaacctgaattattcgatctcttggcctcatgatccatcagcctt

SEQ ID NO: 727 - DNA, 60 bp, Homo sapiens
gtcagctactggctctgtcacttaactgtcgatctcctgaccttgtgtttcacctgcctt

SEQ ID NO: 728 - DNA, 60 bp, Homo sapiens
gcctctgctgtgtaacttcagaggaaattcgaactcctgacacctcaggtgatctacctg

SEQ ID NO: 729 - DNA, 60 bp, Homo sapiens
attaggcactgtagaatctagcagcatctcgagaccatcctggccaacattctgaaaccc

SEQ ID NO: 730 - DNA, 60 bp, Homo sapiens
ccttaataaaataaactttctaaattgatcgatctcttgacctcgtactctgcctgcctt

SEQ ID NO: 731 - DNA, 60 bp, Homo sapiens
tttagttatgatagaggaaatcacgctatcgacttcttcctggtttagtcttaggagggt

SEQ ID NO: 732 - DNA, 60 bp, Homo sapiens
gcttcaaaaaataaaactaaaaatatgttcgaactcctgacctcaggtaatctatccgcc

SEQ ID NO: 733 - DNA, 60 bp, Homo sapiens
ggtattgatataaaatagtgattttatatcgatctcctgatctcgtgatctaccttcctt

SEQ ID NO: 734 - DNA, 60 bp, Homo sapiens
cagtaacttcagttttttatttactcattcgaactcctgacctcaggtaatctatccgcc

SEQ ID NO: 735 - DNA, 60 bp, Homo sapiens
gtcacactcttaccaagctaaaactctttcgatctcctgacctcgtgattacaggtgtga

SEQ ID NO: 736 - DNA, 60 bp, Homo sapiens
ttccaaaattctgagattcttaattatgtcgaactcctgacctcagtcaatctgcccacc

SEQ ID NO: 737 - DNA, 60 bp, Homo sapiens
aagaattaagagtaaaaattatgtgaggtcgaactgctgacctcgttatccacccacttc

SEQ ID NO: 738 - DNA, 60 bp, Homo sapiens
tcctcaaaaaaattaaaaatagaactactcgagaccatcctggctaatttggtgaaaccc

SEQ ID NO: 739 - DNA, 60 bp, Homo sapiens
aattttagaccaacatccctgatgaacatcgagaccagcctgaacaatatagtgagaccc

SEQ ID NO: 740 - DNA, 60 bp, Homo sapiens
ggtgggtggatcacttcaagtcaggagttcgatctcctgacctagtgatccacccacctc

SEQ ID NO: 741 - DNA, 60 bp, Homo sapiens
acggaatctggattgaataaatagggaatcgatctcttgacctcgtgatccaatcacctt

SEQ ID NO: 742 - DNA, 60 bp, Homo sapiens
aatagagaccatattggccaggatggtctcgagggtagtcatgttttccttcctgaggat

SEQ ID NO: 743 - DNA, 60 bp, Homo sapiens
taccagggatgtctgaaggaactaagagtcgatctcctgactttgtgatcctcccacgtc

SEQ ID NO: 744 - DNA, 60 bp, Homo sapiens
cttggaagacagaaaaatacctaatctttcgaactcctgaccttataatccccctgcctt

SEQ ID NO: 745 - DNA, 60 bp, Homo sapiens
agctggggttaaattcatttaaatgagttcgaactcctgacctcacgtaattctcccacc

SEQ ID NO: 746 - DNA, 60 bp, Homo sapiens
agcaactcttaatcttcaggcttccttctcgattttagatctttcctgctttctcttgtg

SEQ ID NO: 747 - DNA, 60 bp, Homo sapiens
ccttacaaaaagttctaaagggagttgttcgaggagtatctttgtggctttctctgtatt

SEQ ID NO: 748 - DNA, 60 bp, Homo sapiens
tctctaaacataaattgtgaagattccatcgaactcccgacctcagaggatctgtctgcc

SEQ ID NO: 749 - DNA, 60 bp, Homo sapiens
gagcccagtagttcaaggtttcagtgagtcgaactcctgacctcatgtgatttggccgct

SEQ ID NO: 750 - DNA, 60 bp, Homo sapiens
gaggcaggcaaatcacgagctcaggagatcgaactcctgacctcatgatttgcctgcctc

SEQ ID NO: 751 - DNA, 60 bp, Homo sapiens
tggctgatttccagagaagaatacaaactcgagaccagccttgaccaatatggtgaaatc

SEQ ID NO: 752 - DNA, 60 bp, Homo sapiens
tgagaacagattctctagaaaagtcgcctcgagaccagcctagataacttggtgaaactc

SEQ ID NO: 753 - DNA, 60 bp, Homo sapiens
aaagccctgttatcaaattaggtcacaatcgaactcctgacctcaaaagatctgctcgct

SEQ ID NO: 754 - DNA, 60 bp, Homo sapiens
atgttgtaaccaaaagaacttaaacatttcgatctcctgaccttgtcatccacctacctc

SEQ ID NO: 755 - DNA, 60 bp, Homo sapiens
ttttcccttctcacaggtattgtgttgttcgatctcttgacctcgtactctgcctgcctt

SEQ ID NO: 756 - DNA, 60 bp, Homo sapiens
ctccttacttcattatgactggatttgatcgaactcctgacctgatgatccccctacttg

SEQ ID NO: 757 - DNA, 60 bp, Homo sapiens
gaaagccaagctgggtggactcaggagttcgatgcaaaaatcctcaataaaatactggca

SEQ ID NO: 758 - DNA, 60 bp, Homo sapiens
agtcacacatacaactttagtgtaccattcgatctccagaccttgtgatttgcctgcctt

SEQ ID NO: 759 - DNA, 60 bp, Homo sapiens
ttaatacaaaaaactaattaaaatttaatcgaactcctgaccccaggtgttctacccgcc

SEQ ID NO: 760 - DNA, 60 bp, Homo sapiens
agcggtttttttgtgatgttagagatgttcgaactcctgacctcaaaagatctgctcgct

SEQ ID NO: 761 - DNA, 60 bp, Homo sapiens
gtggagaccctaactgcttttagggagatcgaggaatttatccatttcttctagattttc

SEQ ID NO: 762 - DNA, 60 bp, Homo sapiens
tgtacaagcatattcattgatgtcttgttcgaactccttgacctcaggtgatctacctgc

SEQ ID NO: 763 - DNA, 60 bp, Homo sapiens
tggatcatgggaggcctaggtcgggagttcgatggtctttacaatttggcttgtttttgc

SEQ ID NO: 764 - DNA, 60 bp, Homo sapiens
atttctttcttcttcccattttctaaaatcgaactcctgaccttgggtaatccaccctcc

SEQ ID NO: 765 - DNA, 60 bp, Homo sapiens
ttgtctttgcacctttttcaaaaattagtcgaactcctgatcttatgatccacccacctc

SEQ ID NO: 766 - DNA, 60 bp, Homo sapiens
cctgaaccttttgggctgaacttcaccttcgaactcctgacctcaagctatccatctgcc

SEQ ID NO: 767 - DNA, 60 bp, Homo sapiens
ctattcttgcattgctacaaagaaacattcgatctcttgaactcatgatcgcctgcctca

SEQ ID NO: 768 - DNA, 60 bp, Homo sapiens
aaatactttgttatatataaaatggagttcgaactcttgacctcaagtgatcacccatct

SEQ ID NO: 769 - DNA, 60 bp, Homo sapiens
ggtgttcaccatattagtcaggttggtctcgaggcttctctgggttcatttcctttaaat

SEQ ID NO: 770 - DNA, 60 bp, Homo sapiens
aattttagaccaatatgcctgatgaacatcgaactcctgacctgggccttccaaagtgct

SEQ ID NO: 771 - DNA, 60 bp, Homo sapiens
gagagtataagtgttatgattggccacttcgatctcttgacctcgtactctgcctgcctt

SEQ ID NO: 772 - DNA, 60 bp, Homo sapiens
attttcaccaaaaccttttaataagaattcgaactcctgatctcgtgatatgctggcctc

SEQ ID NO: 773 - DNA, 60 bp, Homo sapiens
aatttgaatatagtaggagctatttaagtcgaacccctgacctcatgatcttcccacctt

SEQ ID NO: 774 - DNA, 60 bp, Homo sapiens
atgtattcttcaaagttagtacttttgttcgaactcctggccttatgtaacccacctgcc

SEQ ID NO: 775 - DNA, 60 bp, Homo sapiens
tcaagaggtgaaacccttattggaggaatcgaactcctggccttatgtaacccacctgcc

SEQ ID NO: 776 - DNA, 60 bp, Homo sapiens
ccatttgtttgtatcctcttttatttcatcgatctcctgacctcgtgcgcaagagcaatg

SEQ ID NO: 777 - DNA, 60 bp, Homo sapiens
aactgaaggagctcttaatggccaaaactcgagaccatcctggtcaacactgtgaaaacc

SEQ ID NO: 778 - DNA, 60 bp, Homo sapiens
ggtgagagaattgcttgacccaaggagttcgatctcctgacctcagatgatttgcctgcc

SEQ ID NO: 779 - DNA, 60 bp, Homo sapiens
caaaaattgccaaaaataagtaggtttttcgaactcctgacttcggtgatctacctgccg

SEQ ID NO: 780 - DNA, 60 bp, Homo sapiens
ctcaaagaacttaaaacaaaattaccattcgaagtcctgacctcaggtaatcctgctgcc

SEQ ID NO: 781 - DNA, 60 bp, Homo sapiens
ctaaaccagtaaatgtttaataaaaagatcgaggggtatctttgtggcattctctgtatt

SEQ ID NO: 782 - DNA, 60 bp, Homo sapiens
tgttttcattttaagatgaagacagccttcgagaccatcctggctaacatgatgaaatcc

SEQ ID NO: 783 - DNA, 60 bp, Homo sapiens
atgtgttgttctcaattttgcacttgcttcgaactcctgacctcagtcaatctgcccacc

SEQ ID NO: 784 - DNA, 60 bp, Homo sapiens
gatgggcagattacttgaagtcaagagttcgaactcctgacctcaagtgaaactcccatc

SEQ ID NO: 785 - DNA, 60 bp, Homo sapiens
atacaagagtcatgtacaagaccttgcttcgagaccatcctggctaatttggtgaaaccc

SEQ ID NO: 786 - DNA, 60 bp, Homo sapiens
ccaagtaaaatgttgttcacttttgtgctcgatgcaaaaatcctcaataaaatactggca

SEQ ID NO: 787 - DNA, 60 bp, Homo sapiens
aatgttctcttatgaacatcatttaagttcgaactcctgacctcaagtgaaactcccatc

SEQ ID NO: 788 - DNA, 60 bp, Homo sapiens
acctgaagaaacattgttttcttaaaaatcgatctcttgaccttctgatctgcctgcctc

SEQ ID NO: 789 - DNA, 60 bp, Homo sapiens
agaagtttaagctacaaaataaaatgtttcgaactcccgacctccagtggaagttcacac

SEQ ID NO: 790 - DNA, 60 bp, Homo sapiens
tctctctggccacttatttatttatttttcgatctcctgacctggaacatcacccttttg

SEQ ID NO: 791 - DNA, 60 bp, Homo sapiens
ggcaagtggatagattgagcccaggaagtcgaactcctgacctaaggtgatctgtccacc

SEQ ID NO: 792 - DNA, 60 bp, Homo sapiens
tacaacaggctccaagacaacactttattcgaactcctgacctcagatgattcatctgcc

SEQ ID NO: 793 - DNA, 60 bp, Homo sapiens
acctgattttgcatcggagaattcacactcgagaccagcctggccaggatgatgaaaccc

SEQ ID NO: 794 - DNA, 60 bp, Homo sapiens
agaataagaagggaagataaggacagaatcgaacttcctcctttagctcggagaagtttg

SEQ ID NO: 795 - DNA, 60 bp, Homo sapiens
ccttacgatggggtcccagctggacacctcgagaccagcctgagaaatacggtgaaaccc

SEQ ID NO: 796 - DNA, 60 bp, Homo sapiens
gagctaaatcgctttgattggctgttcatcgatctcctgacttcgtgatcaacccacctc

SEQ ID NO: 797 - DNA, 60 bp, Homo sapiens
aatgtaaagcattacatggaaacagtactcgaacttcctcctttagctcggagaagtttg

SEQ ID NO: 798 - DNA, 60 bp, Homo sapiens
ttgctgactctggagagtccaggtggtctcgaggactatctttgtggcgttctctgtatt

SEQ ID NO: 799 - DNA, 60 bp, Homo sapiens
tctgagaaacttttttgtgagaaactgatcgaactcctgatctcaggagatccacccacc

SEQ ID NO: 800 - DNA, 60 bp, Homo sapiens
tttctctaaggtatgttaaaactcttgttcgaactcctgacctcattatctgcccacctt

SEQ ID NO: 801 - DNA, 60 bp, Homo sapiens
gaaatcaagataggaatttaaaaattcttcgaactcctgatctcgtgatatgctggcctc

SEQ ID NO: 802 - DNA, 60 bp, Homo sapiens
ccaaaacaaaaatagcactgacaaaagatcgatctcttgacctcgtactctgcctgcctt

SEQ ID NO: 803 - DNA, 60 bp, Homo sapiens
tgacaaagaaaaagtatgcaaaaagaagtcgaactcctggcttcaagtaagagttcactt

SEQ ID NO: 804 - DNA, 60 bp, Homo sapiens
cagcaaagttttattgtaaaataagagatcgaactcctgacctccagtcatccacccgcg

SEQ ID NO: 805 - DNA, 60 bp, Homo sapiens
tccaacattcagagtttatttatttgaatcgatctcttgacttcatgatccacctgactt

SEQ ID NO: 806 - DNA, 60 bp, Homo sapiens
caaaaaaatgaacagtacttttttcttatcgacttcttcctggtttagtcttaggagggt

SEQ ID NO: 807 - DNA, 60 bp, Homo sapiens
gtattctcagtagaaattcttttatttttcgatctcctgaccttgtcattctcccatctc

SEQ ID NO: 808 - DNA, 60 bp, Homo sapiens
gaataaatgaaaggcctagctaaagcagtcgaactcctgacctcaagtaatccaaccacc

SEQ ID NO: 809 - DNA, 60 bp, Homo sapiens
tgaatgtcttggtagtaatttgacaatatcgatctcctgatcttgtgattcccccacctt

SEQ ID NO: 810 - DNA, 60 bp, Homo sapiens
tcatctatattttcttctcttaggtatttcgatgttcatcagggatgttggtttaaaatt

SEQ ID NO: 811 - DNA, 60 bp, Homo sapiens
tgagattttgtctcaaaaaaaaaaaaagtcgaactcctgacctcaggtcatcagcctgcc

SEQ ID NO: 812 - DNA, 60 bp, Homo sapiens
aagttcaacaaggttgccaattaccaaatcgaactcctgacctcaggcagtcaccttctt

SEQ ID NO: 813 - DNA, 60 bp, Homo sapiens
tctgtctttgcttttgcagttttcctcatcgaactcctgacctgatgatccccctacttg

SEQ ID NO: 814 - DNA, 60 bp, Homo sapiens
cacagggtgacaggagacagaatgagagtcgaactcctgacctcaggtgaataacctgcc

SEQ ID NO: 815 - DNA, 60 bp, Homo sapiens
ttatttaggaatggtttcctttagcacttcgaactcctgacttcgggtgatccctcccat

SEQ ID NO: 816 - DNA, 60 bp, Homo sapiens
aagatcgttattgcttgagcccaggagttcgaactcctgacctcaagagatctgtcctcc

SEQ ID NO: 817 - DNA, 60 bp, Homo sapiens
gtacctgggggacagaaattgcagtgagtcgaactcctgacacctcaggtgatctacctg

SEQ ID NO: 818 - DNA, 60 bp, Homo sapiens
ctgttttctatccttcctgatatttcactcgaactcctgacctgatgatccccctacttg

SEQ ID NO: 819 - DNA, 60 bp, Homo sapiens
ttcaaaagacaaaaaagacaaccaaaagtcgaactcctgacctgaagggatctgtctgcc

SEQ ID NO: 820 - DNA, 60 bp, Homo sapiens
agttactgagataagagtttttaaaaaatcgaactcgtgacctcaagtggtctccctgcc

SEQ ID NO: 821 - DNA, 24 bp, Homo sapiens
aaagcggggtgtcaagcgggggcc

SEQ ID NO: 822 - DNA, 25 bp, Homo sapiens
agccgtagtacctgcggcaggcaca

SEQ ID NO: 823 - DNA, 25 bp, Homo sapiens
caagttatgcgcggcatctaatttt

SEQ ID NO: 824 - DNA, 23 bp, Homo sapiens
tcactatccatatacgaggtggc

SEQ ID NO: 825 - DNA, 23 bp, Homo sapiens
gtgtattgccgactgcccttgtc

SEQ ID NO: 826 - DNA, 23 bp, Homo sapiens
gatgttccgtttggtctatagca

SEQ ID NO: 827 - DNA, 24 bp, Homo sapiens
aatggtggagaaggacggaaacca

SEQ ID NO: 828 - DNA, 25 bp, Homo sapiens
gtgtgttgtctctcatttctgctta

SEQ ID NO: 829 - DNA, 25 bp, Homo sapiens
aattactattgactgcgagttcgct

SEQ ID NO: 830 - DNA, 25 bp, Homo sapiens
accttggtggcgccccgtacgccgt

SEQ ID NO: 831 - DNA, 23 bp, Homo sapiens
ctagtgacccgatgagttgccga

SEQ ID NO: 832 - DNA, 23 bp, Homo sapiens
caggtagctgccctcacgggact

SEQ ID NO: 833 - DNA, 23 bp, Homo sapiens
ttttaggtgcgtgatagactatg

SEQ ID NO: 834 - DNA, 23 bp, Homo sapiens
gcactttacactggtatagggac

SEQ ID NO: 835 - DNA, 24 bp, Homo sapiens
actagggtccttcagagccggtag

SEQ ID NO: 836 - DNA, 24 bp, Homo sapiens
gtgtgtagccgagctaataaaacg

SEQ ID NO: 837 - DNA, 23 bp, Homo sapiens
tgtatggcatacgtgtacgagct

SEQ ID NO: 838 - DNA, 25 bp, Homo sapiens
tgcgtgctaacggaacgcttcaggc

SEQ ID NO: 839 - DNA, 24 bp, Homo sapiens
ctgcaggaatcaaatcgcatccgc

SEQ ID NO: 840 - DNA, 24 bp, Homo sapiens
atcgaaattatggtaccgagaggc

SEQ ID NO: 841 - DNA, 24 bp, Homo sapiens
gtgcacatgagatcgggcacagat

SEQ ID NO: 842 - DNA, 24 bp, Homo sapiens
agcaccaggcattcgtttcataac

SEQ ID NO: 843 - DNA, 23 bp, Homo sapiens
ccccgctacctaagaggctaagg

SEQ ID NO: 844 - DNA, 23 bp, Homo sapiens
gctgcctaagggtctctttggtc

SEQ ID NO: 845 - DNA, 25 bp, Homo sapiens
ggtgatgccccaaacagtttgttat

SEQ ID NO: 846 - DNA, 23 bp, Homo sapiens
gaacagtcgggctttctagggcg

SEQ ID NO: 847 - DNA, 26 bp, Homo sapiens
ctcagtctccaaagaatccgaaagta

SEQ ID NO: 848 - DNA, 26 bp, Homo sapiens
ggctgcctaagggtctctttggtcta

SEQ ID NO: 849 - DNA, 23 bp, Homo sapiens
gaggagagtggcagaaggaccaa

SEQ ID NO: 850 - DNA, 23 bp, Homo sapiens
cctggctgtcatccaaccaccac

SEQ ID NO: 851 - DNA, 23 bp, Homo sapiens
gcctcacagagcctcatttccac

SEQ ID NO: 852 - DNA, 23 bp, Homo sapiens
tagtggattcctggctgggcacg

SEQ ID NO: 853 - DNA, 25 bp, Homo sapiens
aatcctttaacggtcctcgtgcgat

SEQ ID NO: 854 - DNA, 25 bp, Homo sapiens
acttatacccacgtacccaacatgt

SEQ ID NO: 855 - DNA, 24 bp, Homo sapiens
ctccagaagccgtcttatgtgggc

SEQ ID NO: 856 - DNA, 25 bp, Homo sapiens
gatgtcgatgagcaaaagtgggtgg

SEQ ID NO: 857 - DNA, 23 bp, Homo sapiens
acgcgacgttactctgatggcaa

SEQ ID NO: 858 - DNA, 25 bp, Homo sapiens
gctcgggaactgcctggacgccctc

SEQ ID NO: 859 - DNA, 24 bp, Homo sapiens
gtattcatcatgataatgcgtagg

SEQ ID NO: 860 - DNA, 25 bp, Homo sapiens
cgtgtatacataaagactgtacggt

SEQ ID NO: 861 - DNA, 24 bp, Homo sapiens
gcactaccagttgccgttacacta

SEQ ID NO: 862 - DNA, 23 bp, Homo sapiens
catttacactggggtgagatacg

SEQ ID NO: 863 - DNA, 23 bp, Homo sapiens
gccttgcgagggccatcctattt

SEQ ID NO: 864 - DNA, 24 bp, Homo sapiens
tgagaggaaaaatatatcgttagt

SEQ ID NO: 865 - DNA, 24 bp, Homo sapiens
ctcggtgggttaaatatgatttgg

SEQ ID NO: 866 - DNA, 25 bp, Homo sapiens
aagaacttagttttgagattatccc

SEQ ID NO: 867 - DNA, 23 bp, Homo sapiens
ggacgagacgcgcatggggtgac

SEQ ID NO: 868 - DNA, 25 bp, Homo sapiens
gcgtaagttcaactatgattctatt

SEQ ID NO: 869 - DNA, 23 bp, Homo sapiens
gccccacctggtccacagaaatc

SEQ ID NO: 870 - DNA, 23 bp, Homo sapiens
gcggaacttcaaaggtcaggtgc

SEQ ID NO: 871 - DNA, 25 bp, Homo sapiens
cagcctgtcctgcaatgaggaatat

SEQ ID NO: 872 - DNA, 24 bp, Homo sapiens
atctacgagctgccctccctatac

SEQ ID NO: 873 - DNA, 25 bp, Homo sapiens
acagaattcgaaacatctggggatt

SEQ ID NO: 874 - DNA, 25 bp, Homo sapiens
cgcagggccgtaagttacgctcaga

SEQ ID NO: 875 - DNA, 23 bp, Homo sapiens
tttatgacttacatctctatagg

SEQ ID NO: 876 - DNA, 25 bp, Homo sapiens
tcaactgcccttgggagaccaatgc

SEQ ID NO: 877 - DNA, 24 bp, Homo sapiens
atacaactaggactagggcgcacg

SEQ ID NO: 878 - DNA, 24 bp, Homo sapiens
aacctccatgtgttcggctaaaag

SEQ ID NO: 879 - DNA, 24 bp, Homo sapiens
ttaggcccgtatgtacagtcaccg

SEQ ID NO: 880 - DNA, 24 bp, Homo sapiens
ccatgcatttcttaatcctttgtc

SEQ ID NO: 881 - DNA, 24 bp, Homo sapiens
cttgagctcggagaaattacagtc

SEQ ID NO: 882 - DNA, 23 bp, Homo sapiens
ccgaaattgtttatgacttagta

SEQ ID NO: 883 - DNA, 25 bp, Homo sapiens
cagtgacaaattcttgccacgcggt

SEQ ID NO: 884 - DNA, 23 bp, Homo sapiens
caccctccaaaagagcagcagat

SEQ ID NO: 885 - DNA, 23 bp, Homo sapiens
cgagagtccaattcacttgttag

SEQ ID NO: 886 - DNA, 24 bp, Homo sapiens
tttgggcgtagctgtgtcgagtgc

SEQ ID NO: 887 - DNA, 23 bp, Homo sapiens
ccgcagcaactacactcagcctt

SEQ ID NO: 888 - DNA, 23 bp, Homo sapiens
ataatggactgggctgggcgtgg

SEQ ID NO: 889 - DNA, 25 bp, Homo sapiens
atagggccgtgtagaggatctcaaa

SEQ ID NO: 890 - DNA, 23 bp, Homo sapiens
ccgtctcgctgtactaactcgca

SEQ ID NO: 891 - DNA, 25 bp, Homo sapiens
aaaaaggaaacagccgtcgccttga

SEQ ID NO: 892 - DNA, 24 bp, Homo sapiens
tcaagcgagcacgttttttgcagt

SEQ ID NO: 893 - DNA, 23 bp, Homo sapiens
gccgagaacattcaccgctttcc

SEQ ID NO: 894 - DNA, 23 bp, Homo sapiens
taccagctcgaggtgttaatacc

SEQ ID NO: 895 - DNA, 25 bp, Homo sapiens
aagtcaatgcgtcgatgacgtgggt

SEQ ID NO: 896 - DNA, 25 bp, Homo sapiens
attgcagaaacgtcacgtcctggcc

SEQ ID NO: 897 - DNA, 26 bp, Homo sapiens
cgcaccacattttatttcctacagtc

SEQ ID NO: 898 - DNA, 26 bp, Homo sapiens
tgtgactgtgctaccaccaactacgg

SEQ ID NO: 899 - DNA, 25 bp, Homo sapiens
cccgggcccacttgtttttacccat

SEQ ID NO: 900 - DNA, 24 bp, Homo sapiens
tcgaatatcgagctccatcaggct

SEQ ID NO: 901 - DNA, 25 bp, Homo sapiens
aagcacattaggctcaatgtgtaca

SEQ ID NO: 902 - DNA, 25 bp, Homo sapiens
cgcagtatgcaacgcttgcggaccg

SEQ ID NO: 903 - DNA, 26 bp, Homo sapiens
caatgagggcagaggaatagaggaat

SEQ ID NO: 904 - DNA, 26 bp, Homo sapiens
tgagatgatgggcaccagggtaatgg

SEQ ID NO: 905 - DNA, 25 bp, Homo sapiens
cattcctgggattattaggcgtggc

SEQ ID NO: 906 - DNA, 25 bp, Homo sapiens
cgtccgcagacatgtctcttcggta

SEQ ID NO: 907 - DNA, 26 bp, Homo sapiens
gttgtcccagccctaagtagatgata

SEQ ID NO: 908 - DNA, 26 bp, Homo sapiens
agtgctgtgacattggtggtagtggc

SEQ ID NO: 909 - DNA, 23 bp, Homo sapiens
taagctttctaggagtcatcaag

SEQ ID NO: 910 - DNA, 24 bp, Homo sapiens
cggccctatcctgagattggtatt

SEQ ID NO: 911 - DNA, 23 bp, Homo sapiens
ccacggcatttactgtgctccag

SEQ ID NO: 912 - DNA, 23 bp, Homo sapiens
aaagcaggaactggctgggcgtg

SEQ ID NO: 913 - DNA, 23 bp, Homo sapiens
gatagttctttagtagcgcactc

SEQ ID NO: 914 - DNA, 25 bp, Homo sapiens
acacacgtcgttgtatcatcaatgt

SEQ ID NO: 915 - DNA, 23 bp, Homo sapiens
ttattcgctcagcgtcatcgaaa

SEQ ID NO: 916 - DNA, 25 bp, Homo sapiens
gtcttcatagcgaggactacgctga

SEQ ID NO: 917 - DNA, 25 bp, Homo sapiens
ccgttcagacggctagactcagcag

SEQ ID NO: 918 - DNA, 24 bp, Homo sapiens
tgtttaaaaaggtgcccgagtgcg

SEQ ID NO: 919 - DNA, 24 bp, Homo sapiens
aaaactgacgggtcgaactctgct

SEQ ID NO: 920 - DNA, 24 bp, Homo sapiens
atgctaccaagagcctaatgggat

SEQ ID NO: 921 - DNA, 25 bp, Homo sapiens
tcctgctctcgtccatggtattcgc

SEQ ID NO: 922 - DNA, 24 bp, Homo sapiens
gcaggaatacttgtgggtgcgcac

SEQ ID NO: 923 - DNA, 23 bp, Homo sapiens
aggtcacctaagaagggttgcat

SEQ ID NO: 924 - DNA, 24 bp, Homo sapiens
cctgcaccggttatatgaactaca

SEQ ID NO: 925 - DNA, 25 bp, Homo sapiens
tgaaaagagtgctcctgcgataaat

SEQ ID NO: 926 - DNA, 23 bp, Homo sapiens
agagagcctttagaaacacaccg

SEQ ID NO: 927 - DNA, 25 bp, Homo sapiens
gttctctatgcgcaggtccccttcg

SEQ ID NO: 928 - DNA, 25 bp, Homo sapiens
ctgtaaggaagttagtcaagacgta

SEQ ID NO: 929 - DNA, 26 bp, Homo sapiens
cttctctatcttccacaacctcacca

SEQ ID NO: 930 - DNA, 26 bp, Homo sapiens
taaatgggagcagccacagtgaggac

SEQ ID NO: 931 - DNA, 25 bp, Homo sapiens
ttgaatcgtagaataccagtagttt

SEQ ID NO: 932 - DNA, 25 bp, Homo sapiens
gggtccatgcgaagggtggcagacc

SEQ ID NO: 933 - DNA, 23 bp, Homo sapiens
gtgtttaccaatgttccaccccc

SEQ ID NO: 934 - DNA, 24 bp, Homo sapiens
gttttataaagtgaggacggaccg

SEQ ID NO: 935 - DNA, 23 bp, Homo sapiens
cgcgccttttgggaagctcacgt

SEQ ID NO: 936 - DNA, 23 bp, Homo sapiens
gtagtggccaccctcttcaagct

SEQ ID NO: 937 - DNA, 26 bp, Homo sapiens
aatacctacccttgcccttcccacca

SEQ ID NO: 938 - DNA, 26 bp, Homo sapiens
aatctctctcggtgttttagccgtca

SEQ ID NO: 939 - DNA, 24 bp, Homo sapiens
agtgccttcaagacccccaagatc

SEQ ID NO: 940 - DNA, 23 bp, Homo sapiens
ggaaagtgagtatattgctaggg

SEQ ID NO: 941 - DNA, 26 bp, Homo sapiens
ccaccaacaccactttcaaacccgca

SEQ ID NO: 942 - DNA, 26 bp, Homo sapiens
caaactacatcctgtgagccaaacta

SEQ ID NO: 943 - DNA, 23 bp, Homo sapiens
aattctcacgggcaaagcagatg

SEQ ID NO: 944 - DNA, 24 bp, Homo sapiens
atggcgagtcgcgctttccgtaat

SEQ ID NO: 945 - DNA, 23 bp, Homo sapiens
ccctgaggtagcacaacagaacc

SEQ ID NO: 946 - DNA, 23 bp, Homo sapiens
tagtggattcctggctgggcacg

SEQ ID NO: 947 - DNA, 23 bp, Homo sapiens
cccctaacttcctcttctcaccc

SEQ ID NO: 948 - DNA, 23 bp, Homo sapiens
gatagtgagcccagagcagtggc

SEQ ID NO: 949 - DNA, 25 bp, Homo sapiens
cttgcccgctcctggacaggtggtc

SEQ ID NO: 950 - DNA, 24 bp, Homo sapiens
tacgatgtgacagagccggtcccg

SEQ ID NO: 951 - DNA, 24 bp, Homo sapiens
ttaaaaagacgaacactctgggtt

SEQ ID NO: 952 - DNA, 25 bp, Homo sapiens
tttattttagcgtctagggcctgag

SEQ ID NO: 953 - DNA, 23 bp, Homo sapiens
taaaaatctgtcaagccagttag

SEQ ID NO: 954 - DNA, 23 bp, Homo sapiens
ttcatccaagctccaagctacga

SEQ ID NO: 955 - DNA, 24 bp, Homo sapiens
agcgtacacgagcgacaacgacgc

SEQ ID NO: 956 - DNA, 24 bp, Homo sapiens
taaagacttagagttccggcccac

SEQ ID NO: 957 - DNA, 23 bp, Homo sapiens
cctctgacgcaatgagccgcaag

SEQ ID NO: 958 - DNA, 23 bp, Homo sapiens
ctgtatactgccacacattagag

SEQ ID NO: 959 - DNA, 23 bp, Homo sapiens
ctccgtgagtcctcttagcccct

SEQ ID NO: 960 - DNA, 23 bp, Homo sapiens
caagccaaggttcaagccctgac

SEQ ID NO: 961 - DNA, 25 bp, Homo sapiens
aaatcgggccctactgctactggca

SEQ ID NO: 962 - DNA, 24 bp, Homo sapiens
gcgtcacccggctccgaaaatatg

SEQ ID NO: 963 - DNA, 25 bp, Homo sapiens
tctcctatacacttgtgtaccctag

SEQ ID NO: 964 - DNA, 23 bp, Homo sapiens
cgatgctctctatggttcaatcc

SEQ ID NO: 965 - DNA, 23 bp, Homo sapiens
gtataagaagatgcgtcggtgct

SEQ ID NO: 966 - DNA, 24 bp, Homo sapiens
tcgacaaccagtatggtgattcct

SEQ ID NO: 967 - DNA, 23 bp, Homo sapiens
ttcggccttgcaggctggcacac

SEQ ID NO: 968 - DNA, 24 bp, Homo sapiens
atcccctagtcgagatgcatgtga

SEQ ID NO: 969 - DNA, 25 bp, Homo sapiens
aaggagttccaccctccgaaggatc

SEQ ID NO: 970 - DNA, 25 bp, Homo sapiens
cgattttcgggcgaaggggtttgta

SEQ ID NO: 971 - DNA, 24 bp, Homo sapiens
gaacacggagaggtatcccgcccg

SEQ ID NO: 972 - DNA, 24 bp, Homo sapiens
aggacactgtgtaacgtaactgta

SEQ ID NO: 973 - DNA, 24 bp, Homo sapiens
ttcatcgtaccgtatctgccgtta

SEQ ID NO: 974 - DNA, 25 bp, Homo sapiens
gagtacagataattgtggagaacgt

SEQ ID NO: 975 - DNA, 23 bp, Homo sapiens
tgagtccaacgcgtaggctagaa

SEQ ID NO: 976 - DNA, 25 bp, Homo sapiens
ggtggctaggctgtcttgacccaat

SEQ ID NO: 977 - DNA, 24 bp, Homo sapiens
tgtagacagtgtgcactagacact

SEQ ID NO: 978 - DNA, 24 bp, Homo sapiens
gctttggcgcgtaaaggtaaccca

SEQ ID NO: 979 - DNA, 25 bp, Homo sapiens
tgtgaaaaaactcccctcagccatc

SEQ ID NO: 980 - DNA, 25 bp, Homo sapiens
cggacttcggttatgaagggtgaaa

SEQ ID NO: 981 - DNA, 23 bp, Homo sapiens
tcggatggtgactggagcgttat

SEQ ID NO: 982 - DNA, 23 bp, Homo sapiens
ggcactctcgtacaaaagcgttt

SEQ ID NO: 983 - DNA, 24 bp, Homo sapiens
acaggatcccagccttagcggcct

SEQ ID NO: 984 - DNA, 25 bp, Homo sapiens
tgcggtgcgtgtattcgcagtcgaa

SEQ ID NO: 985 - DNA, 25 bp, Homo sapiens
aactggaatcccgcattgcggtagc

SEQ ID NO: 986 - DNA, 23 bp, Homo sapiens
acacatgcacctcgagtggttct

SEQ ID NO: 987 - DNA, 24 bp, Homo sapiens
gaaaactcgtggagttggtccgcg

SEQ ID NO: 988 - DNA, 23 bp, Homo sapiens
aaccaactggctttctcggtcgg

SEQ ID NO: 989 - DNA, 23 bp, Homo sapiens
tagcgaatacgagtgtaccgaac

SEQ ID NO: 990 - DNA, 24 bp, Homo sapiens
ccaaccgtagttatcttcgtaaca

SEQ ID NO: 991 - DNA, 23 bp, Homo sapiens
acaggaaccatgatcaattgacc

SEQ ID NO: 992 - DNA, 23 bp, Homo sapiens
tctagttaccccaccagaaggac

SEQ ID NO: 993 - DNA, 23 bp, Homo sapiens
gccgaacggattctgatcatagt

SEQ ID NO: 994 - DNA, 24 bp, Homo sapiens
aacctgtcaaacgacgccacttcg

SEQ ID NO: 995 - DNA, 23 bp, Homo sapiens
tctccatccctcctcctccagat

SEQ ID NO: 996 - DNA, 23 bp, Homo sapiens
ttacgccaccacacttcagcccc

SEQ ID NO: 997 - DNA, 23 bp, Homo sapiens
tgaagcaaagttctgacggctat

SEQ ID NO: 998 - DNA, 25 bp, Homo sapiens
ccagttgagactctcggactacaac

SEQ ID NO: 999 - DNA, 25 bp, Homo sapiens
cgcagtttccacggaactagattgc

SEQ ID NO: 1000 - DNA, 25 bp, Homo sapiens
gtcctaagtagaggattccaaggcg

SEQ ID NO: 1001 - DNA, 24 bp, Homo sapiens
ttcgtgtgcagaatagcggcatcg

SEQ ID NO: 1002 - DNA, 23 bp, Homo sapiens
tacgggctcgtcttaacgggaat

SEQ ID NO: 1003 - DNA, 25 bp, Homo sapiens
ctttggctgttttctcacatcgtgg

SEQ ID NO: 1004 - DNA, 25 bp, Homo sapiens
gttagtggggacacggcgaaccact

SEQ ID NO: 1005 - DNA, 23 bp, Homo sapiens
ctaactcgaacattagacgtgct

SEQ ID NO: 1006 - DNA, 24 bp, Homo sapiens
tgcagcgtcgatgcatgggtggtc

SEQ ID NO: 1007 - DNA, 25 bp, Homo sapiens
gtccgacatggttgaagttttccta

SEQ ID NO: 1008 - DNA, 23 bp, Homo sapiens
ctgtcgatcgtcgccgcaatggc

SEQ ID NO: 1009 - DNA, 25 bp, Homo sapiens
tccggtgagatggaggcattggtct

SEQ ID NO: 1010 - DNA, 23 bp, Homo sapiens
gacactgccaagatcagtctggc

SEQ ID NO: 1011 - DNA, 24 bp, Homo sapiens
cctcatgtatcgaggcagatgggg

SEQ ID NO: 1012 - DNA, 24 bp, Homo sapiens
ccacagattctttaaacataccct

SEQ ID NO: 1013 - DNA, 25 bp, Homo sapiens
actctagtacaagtcatctcgagcc

SEQ ID NO: 1014 - DNA, 23 bp, Homo sapiens
actattctatggcaagtgctgag

SEQ ID NO: 1015 - DNA, 25 bp, Homo sapiens
tcgcgtgatgaaccgcttcgagcgc

SEQ ID NO: 1016 - DNA, 23 bp, Homo sapiens
gtctgaatcttatgtggaaaccc

SEQ ID NO: 1017 - DNA, 25 bp, Homo sapiens
aaataaatgggcgtggtggcacata

SEQ ID NO: 1018 - DNA, 26 bp, Homo sapiens
gttctgtttcttgaccagtgtgttga

SEQ ID NO: 1019 - DNA, 26 bp, Homo sapiens
ctacatccagtatcttcagaaaacac

SEQ ID NO: 1020 - DNA, 26 bp, Homo sapiens
ccactcttgacctcagtttccctgta

SEQ ID NO: 1021 - DNA, 28 bp, Homo sapiens
ccactaaatggagcagttgtttgacctc

SEQ ID NO: 1022 - DNA, 27 bp, Homo sapiens
ggagaggacgaggaggtcagttcagag

SEQ ID NO: 1023 - DNA, 23 bp, Homo sapiens
gtgcccactgcccacaggacgca

SEQ ID NO: 1024 - DNA, 28 bp, Homo sapiens
ccgcaggtggcaacgacgacacagtagg

SEQ ID NO: 1025 - DNA, 28 bp, Homo sapiens
cacacttagggtctccttctatgtcccc

SEQ ID NO: 1026 - DNA, 27 bp, Homo sapiens
ggagaggacgaggaggtcagttcagag

SEQ ID NO: 1027 - DNA, 28 bp, Homo sapiens
ggcgttgtgcggttttgagaatagttcc

SEQ ID NO: 1028 - DNA, 28 bp, Homo sapiens
tcgttgctaaaagagcctacttcctaat

SEQ ID NO: 1029 - DNA, 28 bp, Homo sapiens
cccacatagaagaatgaagttggacccc

SEQ ID NO: 1030 - DNA, 28 bp, Homo sapiens
gctggtctaaacagaaggaagagaggtg

SEQ ID NO: 1031 - DNA, 28 bp, Homo sapiens
gcgtgtatttctgattcttgccacctcc

SEQ ID NO: 1032 - DNA, 28 bp, Homo sapiens
gaaaagtgtgtaggtcaggtgtagtggc

SEQ ID NO: 1033 - DNA, 24 bp, Homo sapiens
cccctccgtgggacaggaacagtt

SEQ ID NO: 1034 - DNA, 28 bp, Homo sapiens
gagtcacctttcgtcttttccatttccc

SEQ ID NO: 1035 - DNA, 26 bp, Homo sapiens
caagagcaagccacgggaggtagggc

SEQ ID NO: 1036 - DNA, 28 bp, Homo sapiens
gaaaagtgtgtaggtcaggtgtagtggc

SEQ ID NO: 1037 - DNA, 28 bp, Homo sapiens
ggtgaaaggaaggtgtgtgaagtgaacc

SEQ ID NO: 1038 - DNA, 28 bp, Homo sapiens
acattctttcatctactcttccgtctgc

SEQ ID NO: 1039 - DNA, 27 bp, Homo sapiens
ggcagagaagccagagtgagccaagac

SEQ ID NO: 1040 - DNA, 26 bp, Homo sapiens
cacgaggcaactcacccagagacccc

SEQ ID NO: 1041 - DNA, 28 bp, Homo sapiens
agaaagtcccaactctgaagaagtccta

SEQ ID NO: 1042 - DNA, 28 bp, Homo sapiens
gctgttcctccatctcttgccttctcct

SEQ ID NO: 1043 - DNA, 28 bp, Homo sapiens
aatcatcatctctggagcctctgaaagc

SEQ ID NO: 1044 - DNA, 28 bp, Homo sapiens
ctctgctgggtgtcattccttttccctc

SEQ ID NO: 1045 - DNA, 28 bp, Homo sapiens
gtgttcattgtgagatgtgtgacttgac

SEQ ID NO: 1046 - DNA, 28 bp, Homo sapiens
gccccgcctgtctgatttcttattgttg

SEQ ID NO: 1047 - DNA, 28 bp, Homo sapiens
ccactccttctctacaacttcaccagat

SEQ ID NO: 1048 - DNA, 23 bp, Homo sapiens
tttgaaaagaccgtcgggtgcgg

SEQ ID NO: 1049 - DNA, 28 bp, Homo sapiens
ggaagaagggacaggtcagagaggtgag

SEQ ID NO: 1050 - DNA, 28 bp, Homo sapiens
ggtgtctcgctctgtcgccaggcttcag

SEQ ID NO: 1051 - DNA, 28 bp, Homo sapiens
ccccatactcctctcccctgtggttcag

SEQ ID NO: 1052 - DNA, 27 bp, Homo sapiens
cagtgccctggtgaagcagaggttctc

SEQ ID NO: 1053 - DNA, 25 bp, Homo sapiens
taagacctgtaaactgggagagccc

SEQ ID NO: 1054 - DNA, 28 bp, Homo sapiens
ggtgcccaggaaacagcagtgaacaagg

SEQ ID NO: 1055 - DNA, 28 bp, Homo sapiens
gccaataaaacaaataaaagcccctcac

SEQ ID NO: 1056 - DNA, 28 bp, Homo sapiens
gccctgtgttctgtcttatctctccatc

SEQ ID NO: 1057 - DNA, 26 bp, Homo sapiens
gcacaccgccaaggaactcgcttagc

SEQ ID NO: 1058 - DNA, 28 bp, Homo sapiens
tctctctccagggtctctcccaggctgc

SEQ ID NO: 1059 - DNA, 28 bp, Homo sapiens
ggtcttattcattctgtgggttggctct

SEQ ID NO: 1060 - DNA, 27 bp, Homo sapiens
ccatcaggtttggtgtctggtggaggc

SEQ ID NO: 1061 - DNA, 23 bp, Homo sapiens
cggctccctccaggctctgctca

SEQ ID NO: 1062 - DNA, 28 bp, Homo sapiens
ggtgtctcgctctgtcgccaggcttcag

SEQ ID NO: 1063 - DNA, 28 bp, Homo sapiens
gcatccttctctcactgggtattccttt

SEQ ID NO: 1064 - DNA, 28 bp, Homo sapiens
ataaccagccacagttctcactttgaat

SEQ ID NO: 1065 - DNA, 28 bp, Homo sapiens
cctgggttgctggtgtctgtgtttcctc

SEQ ID NO: 1066 - DNA, 28 bp, Homo sapiens
gagtcacctttcgtcttttccatttccc

SEQ ID NO: 1067 - DNA, 28 bp, Homo sapiens
cttgcttagaaaaccatctgtgcctggg

SEQ ID NO: 1068 - DNA, 26 bp, Homo sapiens
gagacaggctgagggagaacccaagc

SEQ ID NO: 1069 - DNA, 28 bp, Homo sapiens
gtagtagacgcattctgtggagttggag

SEQ ID NO: 1070 - DNA, 26 bp, Homo sapiens
gccgctggcaacctccgctctttctg

SEQ ID NO: 1071 - DNA, 28 bp, Homo sapiens
taaacaggttcatccaggttgtgaggta

SEQ ID NO: 1072 - DNA, 28 bp, Homo sapiens
ctgggacagaaggagagggaaagagttg

SEQ ID NO: 1073 - DNA, 28 bp, Homo sapiens
cagaccgatggaatggaaccgagagccc

SEQ ID NO: 1074 - DNA, 28 bp, Homo sapiens
gccacaaggcaactggtctgaatgtttc

SEQ ID NO: 1075 - DNA, 27 bp, Homo sapiens
ctgacgaggtgtctgctccattgcctg

SEQ ID NO: 1076 - DNA, 28 bp, Homo sapiens
gtgcctggcttccttcatctaccaagac

SEQ ID NO: 1077 - DNA, 25 bp, Homo sapiens
catctgcttttgtatggttgtgagc

SEQ ID NO: 1078 - DNA, 28 bp, Homo sapiens
ggaatgtttctgctaaatccaaaagtag

SEQ ID NO: 1079 - DNA, 27 bp, Homo sapiens
gcctgtgggatgactgtggttacctgc

SEQ ID NO: 1080 - DNA, 28 bp, Homo sapiens
ggagggcaggaaggttggtgatgggcag

SEQ ID NO: 1081 - DNA, 28 bp, Homo sapiens
ccaggcaatgctacgccaggctttgtgc

SEQ ID NO: 1082 - DNA, 27 bp, Homo sapiens
cctcttgacctccagcgagaccactcc

SEQ ID NO: 1083 - DNA, 28 bp, Homo sapiens
gggttcatcctcggtagagcggcaaagc

SEQ ID NO: 1084 - DNA, 28 bp, Homo sapiens
ccccacccaatgctgtccttcctttgat

SEQ ID NO: 1085 - DNA, 28 bp, Homo sapiens
ctgtgaaggtgtggagagcacttaggga

SEQ ID NO: 1086 - DNA, 27 bp, Homo sapiens
ccacacacaccacccaggagcccagtg

SEQ ID NO: 1087 - DNA, 28 bp, Homo sapiens
cactgaagcaagttctggaggtggtagt

SEQ ID NO: 1088 - DNA, 28 bp, Homo sapiens
gagtcacctttcgtcttttccatttccc

SEQ ID NO: 1089 - DNA, 26 bp, Homo sapiens
gctgatgcttctggcacctggaccac

SEQ ID NO: 1090 - DNA, 28 bp, Homo sapiens
ttgaacattaggctgggcacggtgtctc

SEQ ID NO: 1091 - DNA, 34 bp, Homo sapiens
tcaattccacaaatcatcgagaccagcctgactg

SEQ ID NO: 1092 - DNA, 33 bp, Homo sapiens
acaacttcgaactcctgaccgaagcgatgatcc

SEQ ID NO: 1093 - DNA, 35 bp, Homo sapiens
agcacttgaacttacattaagtcatcgagaccagc

SEQ ID NO: 1094 - DNA, 34 bp, Homo sapiens
tgtgaatcgaactcctgacctcaaataattcgcc

SEQ ID NO: 1095 - DNA, 34 bp, Homo sapiens
aatgaatcgaactcctgacctcagaagatttgcc

SEQ ID NO: 1096 - DNA, 35 bp, Homo sapiens
actcccaagccattgtgttgtctaaatcgaactcc

SEQ ID NO: 1097 - DNA, 34 bp, Homo sapiens
tacatgtcgaactcctgacctcaggtaatcttcc

SEQ ID NO: 1098 - DNA, 34 bp, Homo sapiens
atgttgtcgaactcctgacctcaactgatttgtc

SEQ ID NO: 1099 - DNA, 34 bp, Homo sapiens
actgaaattcgaggagtatctttgtggctttctc

SEQ ID NO: 1100 - DNA, 35 bp, Homo sapiens
accatttgtctaaccaatcaatcgaactcctgacc

SEQ ID NO: 1101 - DNA, 34 bp, Homo sapiens
tgactgaaattatcttcgaactcctgatctcagg

SEQ ID NO: 1102 - DNA, 35 bp, Homo sapiens
attaagcctttcgaactcctgactttgtgattcgc

SEQ ID NO: 1103 - DNA, 34 bp, Homo sapiens
tccactagaagacttcgaactcctgaccttgtgc

SEQ ID NO: 1104 - DNA, 34 bp, Homo sapiens
ataaattcgatctcttgaccttgtgactcacccg

SEQ ID NO: 1105 - DNA, 34 bp, Homo sapiens
tcaaaatcgatctccttacctcgtaatctgcctg

SEQ ID NO: 1106 - DNA, 34 bp, Homo sapiens
aggcacagtcagttttacattcgaactcctgacc

SEQ ID NO: 1107 - DNA, 34 bp, Homo sapiens
agggctatttcgaactcctgacttgaggtgattc

SEQ ID NO: 1108 - DNA, 33 bp, Homo sapiens
ttcaaatcgaactcctgacctcattacccaccc

SEQ ID NO: 1109 - DNA, 32 bp, Homo sapiens
aatcatccccgggtgcattcgaactcctgacc

SEQ ID NO: 1110 - DNA, 33 bp, Homo sapiens
tgtgatgtgaggtaagagttcgatctcctgacc

SEQ ID NO: 1111 - DNA, 33 bp, Homo sapiens
tgccttagtcgatctccttacctcgtaatctgc

SEQ ID NO: 1112 - DNA, 33 bp, Homo sapiens
acacacttcgaactcctgacctcaggcagtcac

SEQ ID NO: 1113 - DNA, 33 bp, Homo sapiens
agccaaggtggagaactactgaggtcgaactcc

SEQ ID NO: 1114 - DNA, 34 bp, Homo sapiens
tccatttcatcgaactcctgaccctaggtgatcc

SEQ ID NO: 1115 - DNA, 32 bp, Homo sapiens
acctagatacatcgaactcctgaccacaggtg

SEQ ID NO: 1116 - DNA, 32 bp, Homo sapiens
agagcaacagccatcgaagtcctgacctcagg

SEQ ID NO: 1117 - DNA, 34 bp, Homo sapiens
agggaagttttatcgaactcctgaccttgtaatc

SEQ ID NO: 1118 - DNA, 34 bp, Homo sapiens
agtctatcgaactcatgacctcaggttatcctcc

SEQ ID NO: 1119 - DNA, 32 bp, Homo sapiens
tgcactgacacagcagagtcgaactcctgacc

SEQ ID NO: 1120 - DNA, 34 bp, Homo sapiens
tctaagtcgaactcctgacctcaggttatccatc

SEQ ID NO: 1121 - DNA, 34 bp, Homo sapiens
tggtgcttggtcgaactcctgacttcaggaaatc

SEQ ID NO: 1122 - DNA, 33 bp, Homo sapiens
tgcatgatcgaactcctgaccttacgatccacc

SEQ ID NO: 1123 - DNA, 34 bp, Homo sapiens
tcataactcgaactcctgacctcatgatttcctg

SEQ ID NO: 1124 - DNA, 34 bp, Homo sapiens
tgtgctgtagatgaggaatcgaactcctgacctc

SEQ ID NO: 1125 - DNA, 34 bp, Homo sapiens
agttatacagagataaaataagtcgaactcctgg

SEQ ID NO: 1126 - DNA, 34 bp, Homo sapiens
tcagtcaggctggtctcgatgatttgtggaattg

SEQ ID NO: 1127 - DNA, 34 bp, Homo sapiens
tcgcttcggtcaggagttcgaagttgtcaaaacc

SEQ ID NO: 1128 - DNA, 35 bp, Homo sapiens
aggctggtctcgatgacttaatgtaagttcaagtg

SEQ ID NO: 1129 - DNA, 34 bp, Homo sapiens
aggtcaggagttcgattcacatacttctttctga

SEQ ID NO: 1130 - DNA, 34 bp, Homo sapiens
tcttctgaggtcaggagttcgattcattttgagt

SEQ ID NO: 1131 - DNA, 35 bp, Homo sapiens
aggagttcgatttagacaacacaatggcttgggag

SEQ ID NO: 1132 - DNA, 33 bp, Homo sapiens
agattacctgaggtcaggagttcgacatgtaaa

SEQ ID NO: 1133 - DNA, 35 bp, Homo sapiens
tcagttgaggtcaggagttcgacaacattagtaag

SEQ ID NO: 1134 - DNA, 34 bp, Homo sapiens
agagaaagccacaaagatactcctcgaatttcag

SEQ ID NO: 1135 - DNA, 35 bp, Homo sapiens
aggtcaggagttcgattgattggttagacaaatgg

SEQ ID NO: 1136 - DNA, 34 bp, Homo sapiens
acctgagatcaggagttcgaagataatttcagtc

SEQ ID NO: 1137 - DNA, 34 bp, Homo sapiens
tgcgaatcacaaagtcaggagttcgaaaggctta

SEQ ID NO: 1138 - DNA, 34 bp, Homo sapiens
agcacaaggtcaggagttcgaagtcttctagtgg

SEQ ID NO: 1139 - DNA, 32 bp, Homo sapiens
tgagtcacaaggtcaagagatcgaatttatgg

SEQ ID NO: 1140 - DNA, 33 bp, Homo sapiens
aggcagattacgaggtaaggagatcgattttga

SEQ ID NO: 1141 - DNA, 34 bp, Homo sapiens
aggtcaggagttcgaatgtaaaactgactgtgcc

SEQ ID NO: 1142 - DNA, 34 bp, Homo sapiens
tgaatcacctcaagtcaggagttcgaaatagccc

SEQ ID NO: 1143 - DNA, 34 bp, Homo sapiens
tgggtgggtaatgaggtcaggagttcgatttgaa

SEQ ID NO: 1144 - DNA, 31 bp, Homo sapiens
atttgaggtcaggagttcgaatgcacccggg

SEQ ID NO: 1145 - DNA, 33 bp, Homo sapiens
aggtcaggagatcgaactcttacctcacatcac

SEQ ID NO: 1146 - DNA, 33 bp, Homo sapiens
aggcagattacgaggtaaggagatcgactaagg

SEQ ID NO: 1147 - DNA, 32 bp, Homo sapiens
tgactgcctgaggtcaggagttcgaagtgtgt

SEQ ID NO: 1148 - DNA, 33 bp, Homo sapiens
aggagttcgacctcagtagttctccaccttggc

SEQ ID NO: 1149 - DNA, 33 bp, Homo sapiens
acctagggtcaggagttcgatgaaatggatggg

SEQ ID NO: 1150 - DNA, 32 bp, Homo sapiens
tcacctgtggtcaggagttcgatgtatctagg

SEQ ID NO: 1151 - DNA, 32 bp, Homo sapiens
acctgaggtcaggacttcgatggctgttgctc

SEQ ID NO: 1152 - DNA, 34 bp, Homo sapiens
agattacaaggtcaggagttcgataaaacttccc

SEQ ID NO: 1153 - DNA, 35 bp, Homo sapiens
aggaggataacctgaggtcatgagttcgatagact

SEQ ID NO: 1154 - DNA, 32 bp, Homo sapiens
aggtcaggagttcgactctgctgtgtcagtgc

SEQ ID NO: 1155 - DNA, 35 bp, Homo sapiens
acctgaggtcaggagttcgacttagatattcagtg

SEQ ID NO: 1156 - DNA, 34 bp, Homo sapiens
agatttcctgaagtcaggagttcgaccaagcacc

SEQ ID NO: 1157 - DNA, 32 bp, Homo sapiens
tggatcgtaaggtcaggagttcgatcatgcaa

SEQ ID NO: 1158 - DNA, 32 bp, Homo sapiens
aggaaatcatgaggtcaggagttcgagttatg

SEQ ID NO: 1159 - DNA, 34 bp, Homo sapiens
tgaggtcaggagttcgattcctcatctacagcac

SEQ ID NO: 1160 - DNA, 34 bp, Homo sapiens
tccaggagttcgacttattttatctctgtataac

SEQ ID NO: 1161 - DNA, 60 bp, Homo sapiens
agcagtctctacttttctagaggtaggttcgactgtcccaaagtgaacttggaaaatgtt

SEQ ID NO: 1162 - DNA, 60 bp, Homo sapiens
aattaatgaagcgcaaatcaaaggggactcgagcttcccagacatgctcatgctagatta

SEQ ID NO: 1163 - DNA, 60 bp, Homo sapiens
agcagtctctacttttctagaggtaggttcgagtaggctctttctgaccctcagaaatac

SEQ ID NO: 1164 - DNA, 60 bp, Homo sapiens
tacagctgcaggaaaaccccgttcttattcgacatatgctttcagttctcttgggtaaat

SEQ ID NO: 1165 - DNA, 60 bp, Homo sapiens
agcagtctctacttttctagaggtaggttcgaggtaagagaaaggtcagccctcaacttg

SEQ ID NO: 1166 - DNA, 60 bp, Homo sapiens
tacagctgcaggaaaaccccgttcttattcgagagtcattttatcctcaagcactattgc

SEQ ID NO: 1167 - DNA, 60 bp, Homo sapiens
cagaataggaaggagcaagctgagaggttcgaggttcaggctcctcagtgttttgcaggc

SEQ ID NO: 1168 - DNA, 60 bp, Homo sapiens
tacagctgcaggaaaaccccgttcttattcgatgatagtaatcttcaaagaatagtcaca

SEQ ID NO: 1169 - DNA, 60 bp, Homo sapiens
tgaccccaagcattctggcctgaacgattcgatttcccacaaataaatccagtaatcttg

SEQ ID NO: 1170 - DNA, 60 bp, Homo sapiens
ttttagggaccaggggtcagaagatggatcgacagataggccagatagctagacaaagag

SEQ ID NO: 1171 - DNA, 60 bp, Homo sapiens
cctccctgggtcaccagcttcgtgaccctcgatgttctttataccttgcccatattgtac

SEQ ID NO: 1172 - DNA, 60 bp, Homo sapiens
agagagctcaatgtgtttcggctttagttcgatggtgaagacccccatagcttttgttct

SEQ ID NO: 1173 - DNA, 60 bp, Homo sapiens
ggtggaccgacgaggctcaaaatcaagatcgaggatgaggtaaaggtctcggaggataag

SEQ ID NO: 1174 - DNA, 60 bp, Homo sapiens
gtcccaagtggcatgagaggtagactcatcgatcacatcactctttcctgttttttttcc

SEQ ID NO: 1175 - DNA, 60 bp, Homo sapiens
gtcccaagtggcatgagaggtagactcatcgagaagtctctgtgaaactcctgtgcaaaa

SEQ ID NO: 1176 - DNA, 60 bp, Homo sapiens
cacatccctgtctagtcctatctgttcatcgagccagagtgtcactctgtcacctaggct

SEQ ID NO: 1177 - DNA, 60 bp, Homo sapiens
ttgtggtgagaacgatacaggagacagctcgatgtatttccctgggaagacttagctgct

SEQ ID NO: 1178 - DNA, 60 bp, Homo sapiens
ctgtgtggtacaaacatgacaacctaggtcgaggatgaggtaaaggtctcggaggataag

SEQ ID NO: 1179 - DNA, 60 bp, Homo sapiens
cagaataggaaggagcaagctgagaggttcgaggccttccctgcttgcgcggtgcccttc

SEQ ID NO: 1180 - DNA, 60 bp, Homo sapiens
gtcccaagtggcatgagaggtagactcatcgaaggagtcctgtcagaccctaggtctcca

SEQ ID NO: 1181 - DNA, 60 bp, Homo sapiens
gagaggccgttctaaaagcacatttgtatcgaataaatagaaatatagaataaatagaca

SEQ ID NO: 1182 - DNA, 60 bp, Homo sapiens
gagaggccgttctaaaagcacatttgtatcgaggtgccagctgctaagaggggtctcgct

SEQ ID NO: 1183 - DNA, 60 bp, Homo sapiens
cggagggtataataactgctgttgtgtatcgagcaacccctgagaataaggtggctcaat

SEQ ID NO: 1184 - DNA, 60 bp, Homo sapiens
cggagggtataataactgctgttgtgtatcgaggtgtaactcactagcacgttgtctctc

SEQ ID NO: 1185 - DNA, 60 bp, Homo sapiens
gtcccaagtggcatgagaggtagactcatcgaaagtttccaggactgccacactatcagc

SEQ ID NO: 1186 - DNA, 60 bp, Homo sapiens
agagagctcaatgtgtttcggctttagttcgatgctcatattgtcccaaatttaggctgg

SEQ ID NO: 1187 - DNA, 60 bp, Homo sapiens
cagcgcgcagccaaaccgtcgggaacactcgagcagcgggaatgtttgtcttgggattag

SEQ ID NO: 1188 - DNA, 60 bp, Homo sapiens
cccgcgctagtaactgagctttcagtcatcgaagtatgctcctacgctaggtaagtcttg

SEQ ID NO: 1189 - DNA, 60 bp, Homo sapiens
tacagctgcaggaaaaccccgttcttattcgacagagacctccccaggatgagtaaacct

SEQ ID NO: 1190 - DNA, 60 bp, Homo sapiens
cctccctgggtcaccagcttcgtgaccctcgactcaaaggagaaaaatgcatgtccccct

SEQ ID NO: 1191 - DNA, 60 bp, Homo sapiens
tccggagctcagaggttcggaagacttatcgaaaagactttaacatatttgaataccaat

SEQ ID NO: 1192 - DNA, 60 bp, Homo sapiens
cacgccaaacctcaagtacatactaatttcgactcatgctcttgaaaatagtaagaaaaa

SEQ ID NO: 1193 - DNA, 60 bp, Homo sapiens
aagactcctgtctcaagagccgagctcctcgaagccatttataagggttagaactaactt

SEQ ID NO: 1194 - DNA, 60 bp, Homo sapiens
gtgggcagattggacaatcgtgagaagatcgagcacatgcaattccctctgctccatgac

SEQ ID NO: 1195 - DNA, 60 bp, Homo sapiens
cagaataggaaggagcaagctgagaggttcgacctggactcgctggtgagccggccgggc

SEQ ID NO: 1196 - DNA, 60 bp, Homo sapiens
ggagcgggactgactgattgccagcaattcgaaaatgggaagaaaattgcttattgtgtt

SEQ ID NO: 1197 - DNA, 60 bp, Homo sapiens
aactgccgcggctctctctcaacggggttcgagaccaggctggccgacattgcaaaacct

SEQ ID NO: 1198 - DNA, 60 bp, Homo sapiens
tccggagctcagaggttcggaagacttatcgaaagctaaggctttatagaaatgaaggct

SEQ ID NO: 1199 - DNA, 60 bp, Homo sapiens
cccgcgctagtaactgagctttcagtcatcgataccttatttcccttctttgattaaatg

SEQ ID NO: 1200 - DNA, 60 bp, Homo sapiens
gtcccaagtggcatgagaggtagactcatcgatcccatctcctgtctacttgggaccttt

SEQ ID NO: 1201 - DNA, 60 bp, Homo sapiens
cgccctcccaggagatccccacaactaatcgacttaaggaaagaaaaagtcatatgctga

SEQ ID NO: 1202 - DNA, 60 bp, Homo sapiens
aagcgagcggatcacctcggccaggagttcgagacaagcctggccaacatggtgaaaccc

SEQ ID NO: 1203 - DNA, 60 bp, Homo sapiens
gtgaacattcactgtcttcctgacagcttcgatagatagatactattttattttattttt

SEQ ID NO: 1204 - DNA, 60 bp, Homo sapiens
cttgtcagcacttggagctatccaatggtcgaagcgaacagttgggggaactcaaatggg

SEQ ID NO: 1205 - DNA, 60 bp, Homo sapiens
aggtgagaagctttgtccgagatgatggtcgaagaaagggaaatgacttcttctcagtag

SEQ ID NO: 1206 - DNA, 60 bp, Homo sapiens
cggattctggttacagagagggatgagatcgaatggactccgctaagtgtgttggcttga

SEQ ID NO: 1207 - DNA, 60 bp, Homo sapiens
aggtgagaagctttgtccgagatgatggtcgatatattgcacttccaaggtatcatctga

SEQ ID NO: 1208 - DNA, 60 bp, Homo sapiens
agaactcaccatattgccagggctggtctcgaactcctgacgtcaggtgttccacccgcc

SEQ ID NO: 1209 - DNA, 60 bp, Homo sapiens
caggctaagtgcctggggttcatcctaatcgagcaatccatcaggtcattggttaggttc

SEQ ID NO: 1210 - DNA, 60 bp, Homo sapiens
cggattctggttacagagagggatgagatcgaagttgagaattgctggcctagagtccct

SEQ ID NO: 1211 - DNA, 60 bp, Homo sapiens
cccccatcatttgacaaaatatcataactcgagtcccctttgatttgcgcttcattaatt

SEQ ID NO: 1212 - DNA, 60 bp, Homo sapiens
tcaaaagggaagactgcctatatcaaactcgagtcccctttgatttgcgcttcattaatt

SEQ ID NO: 1213 - DNA, 60 bp, Homo sapiens
aattaatgaagcgcaaatcaaaggggactcgactataagagagaggtacgctccgggggg

SEQ ID NO: 1214 - DNA, 60 bp, Homo sapiens
aggctccgttccagttcttgatccacactcgagtcccctttgatttgcgcttcattaatt

SEQ ID NO: 1215 - DNA, 60 bp, Homo sapiens
aattaatgaagcgcaaatcaaaggggactcgaagatccagaaaattggcctggtgcagta

SEQ ID NO: 1216 - DNA, 60 bp, Homo sapiens
cagtccttgcctcctcagaagaaagaactcgagtcccctttgatttgcgcttcattaatt

SEQ ID NO: 1217 - DNA, 60 bp, Homo sapiens
aattaatgaagcgcaaatcaaaggggactcgactttcaaacctttctccacaacagggcc

SEQ ID NO: 1218 - DNA, 60 bp, Homo sapiens
aattaatgaagcgcaaatcaaaggggactcgaatccctgggctgaagtgatccacttgcc

SEQ ID NO: 1219 - DNA, 60 bp, Homo sapiens
aagcgagcggatcacctcggccaggagttcgagagcagcctggccacatgggagggaggg

SEQ ID NO: 1220 - DNA, 60 bp, Homo sapiens
gacagttggactacctgaggtcaggagttcgagacataatttatatagctcagtatatac

SEQ ID NO: 1221 - DNA, 60 bp, Homo sapiens
cccgcgctagtaactgagctttcagtcatcgatgttaccatgaggctttcaaataacaag

SEQ ID NO: 1222 - DNA, 60 bp, Homo sapiens
acagtcctccgctctaccaactgagctatcgaaacctgatgatatggcttctccattcat

SEQ ID NO: 1223 - DNA, 60 bp, Homo sapiens
cagaaagaagacaaggggcatctgaatgtcgaatcaagtttataattttaaaataattgg

SEQ ID NO: 1224 - DNA, 60 bp, Homo sapiens
tccctgagttatgcagctcttccaaatgtcgaggagctaaaagcgaaggccgcggggaag

SEQ ID NO: 1225 - DNA, 60 bp, Homo sapiens
accacaccctggtcctggtagttaaagatcgaccactttcaaatcttttccacctggtaa

SEQ ID NO: 1226 - DNA, 60 bp, Homo sapiens
ggagacagggttacatcagccagtaacatcgatgtttgttttttaaaccagtgaaatata

SEQ ID NO: 1227 - DNA, 60 bp, Homo sapiens
gttgtcttactcctgaaggatgctgcagtcgaggcattttaactaaattatctgcttcac

SEQ ID NO: 1228 - DNA, 60 bp, Homo sapiens
cagaataggaaggagcaagctgagaggttcgacctcccaaattgttgggattacaggcgt

SEQ ID NO: 1229 - DNA, 60 bp, Homo sapiens
cccgcgctagtaactgagctttcagtcatcgaaaataaataagtaaaattaaaaaaaaat

SEQ ID NO: 1230 - DNA, 60 bp, Homo sapiens
agcagtctctacttttctagaggtaggttcgagaaaaagtttctgcagcccctcaccaag

SEQ ID NO: 1231 - DNA, 60 bp, Homo sapiens
taactcacaaaggcaagattagttgatgtcgaggatgaggtaaaggtctcggaggataag

SEQ ID NO: 1232 - DNA, 60 bp, Homo sapiens
caaagcagaggaacacagcaaaacacattcgagttcacattctgccctaacaattacaac

SEQ ID NO: 1233 - DNA, 60 bp, Homo sapiens
aatgacacgctaaaaggaaaaaggaacgtcgaacctctcagcttgctccttcctattctg

SEQ ID NO: 1234 - DNA, 60 bp, Homo sapiens
gtttttggctaccagtccttcacctgcgtcgacctttatagacgctatcaaggaagcacc

SEQ ID NO: 1235 - DNA, 60 bp, Homo sapiens
ttgtggtgagaacgatacaggagacagctcgaaatggttcatagatttaagtgtaaaagt

SEQ ID NO: 1236 - DNA, 60 bp, Homo sapiens
attttgtctgtgaggtcccagctctaattcgactctcctgtgaagacacctcctacaatg

SEQ ID NO: 1237 - DNA, 60 bp, Homo sapiens
cccgcgctagtaactgagctttcagtcatcgacaaactatgcatttctcagaatgcatct

SEQ ID NO: 1238 - DNA, 60 bp, Homo sapiens
gtatgaggtgcaaggccccacccattcttcgagcaagaagaggagggccaagcccaggcc

SEQ ID NO: 1239 - DNA, 60 bp, Homo sapiens
gtcccaagtggcatgagaggtagactcatcgaactcatccattccaaagatggctcaggg

SEQ ID NO: 1240 - DNA, 60 bp, Homo sapiens
gcagggacacttttcaagagttctgtgttcgagatattaaacaagacattcaattggttc

SEQ ID NO: 1241 - DNA, 60 bp, Homo sapiens
gttggaaggaatccagggtaagggatattcgagggaccaaatctccaacttttttttccc

SEQ ID NO: 1242 - DNA, 60 bp, Homo sapiens
gttggaaggaatccagggtaagggatattcgagggttgcttttctttttcaagaaaaatt

SEQ ID NO: 1243 - DNA, 60 bp, Homo sapiens
ttctcatgttaataaacatgaaaaatggtcgatttttaaacctcagcgagggtgggtggg

SEQ ID NO: 1244 - DNA, 60 bp, Homo sapiens
aggtgaccgtcttccagaggagagcggatcgacctttatagacgctatcaaggaagcacc

SEQ ID NO: 1245 - DNA, 60 bp, Homo sapiens
gagacgcgggagaaaagtaggaaataaatcgaaaataaaacaactacgtttgctgtacaa

SEQ ID NO: 1246 - DNA, 60 bp, Homo sapiens
gccaggatagggaagaagcagattgatatcgaggatgatagatcccaaggagagagtgac

SEQ ID NO: 1247 - DNA, 60 bp, Homo sapiens
caaaccagagatgaagcaacaggtctaatcgagtcctttgcccatattttgattggattg

SEQ ID NO: 1248 - DNA, 60 bp, Homo sapiens
cggagggtataataactgctgttgtgtatcgagggcttttcaggactggagtgactgatg

SEQ ID NO: 1249 - DNA, 60 bp, Homo sapiens
gagaggccgttctaaaagcacatttgtatcgaacactttggacagcagtcttttaaatgg

SEQ ID NO: 1250 - DNA, 60 bp, Homo sapiens
gagaggccgttctaaaagcacatttgtatcgagttggtcacctgagcctattattgacgg

SEQ ID NO: 1251 - DNA, 60 bp, Homo sapiens
caaccaaccagaaaacacaggaaacaactcgatttgggaactaaaggattaggcttcttg

SEQ ID NO: 1252 - DNA, 60 bp, Homo sapiens
acgctgaggaggaagattcgggctggattcgaggaagtgtttctggccatggtgaggcct

SEQ ID NO: 1253 - DNA, 60 bp, Homo sapiens
ctgccttcctaaccatgtcctgagaaactcgaaaagcacaatccatgaaagaaaaaaatt

SEQ ID NO: 1254 - DNA, 60 bp, Homo sapiens
gagaggccgttctaaaagcacatttgtatcgatctgtcacatacctagaaatacagggac

SEQ ID NO: 1255 - DNA, 60 bp, Homo sapiens
gttggaaggaatccagggtaagggatattcgatactgcttgaacataaaatgaaatgtag

SEQ ID NO: 1256 - DNA, 60 bp, Homo sapiens
caaagcagtcaaggcccaaagacaaccctcgaaaagaatgtgagacatacctcaggaaaa

SEQ ID NO: 1257 - DNA, 60 bp, Homo sapiens
ttgtggtgagaacgatacaggagacagctcgatttgtagctgatgcatcgcaaactaaaa

SEQ ID NO: 1258 - DNA, 60 bp, Homo sapiens
cgccctcccaggagatccccacaactaatcgacaccctctgatttcatccctgaccagtc

SEQ ID NO: 1259 - DNA, 60 bp, Homo sapiens
gccatcagatctcccacatgaggcattttcgactttgtctccatccaaggacgctatggc

SEQ ID NO: 1260 - DNA, 60 bp, Homo sapiens
gtcccaagtggcatgagaggtagactcatcgagcctgcagtctctgctactcaggaggct

SEQ ID NO: 1261 - DNA, 60 bp, Homo sapiens
gccatcagatctcccacatgaggcattttcgacttcaccatccagctggcctccagcagc

SEQ ID NO: 1262 - DNA, 60 bp, Homo sapiens
cccagctcctgcaaaactcctcctgacttcgagattctgtctaaaaaaaaaagataaaag

SEQ ID NO: 1263 - DNA, 60 bp, Homo sapiens
cggagggtataataactgctgttgtgtatcgacgcggaggcccttgggcatagtcaagac

SEQ ID NO: 1264 - DNA, 60 bp, Homo sapiens
gtcccaagtggcatgagaggtagactcatcgaaaggacctgtctctgcccataagagggc

SEQ ID NO: 1265 - DNA, 60 bp, Homo sapiens
agctgttcctttaatcttcccagcactatcgatgaacacttctttccaaaaaaagtttac

SEQ ID NO: 1266 - DNA, 60 bp, Homo sapiens
ttctagatgccgggatacagagatgagttcgacatgtacggcctggctcagcattgcctt

SEQ ID NO: 1267 - DNA, 60 bp, Homo sapiens
aggaaatgtactaactgttaaggaaaactcgaagctctttaaaagtattccaaccccatc

SEQ ID NO: 1268 - DNA, 60 bp, Homo sapiens
cttatcctccgagacctttacctcatcctcgatgactcttggaggatgctgggagcctga

SEQ ID NO: 1269 - DNA, 60 bp, Homo sapiens
cactccatggtctctccctcatccctaatcgatacagaaaaatttcaagaaaaatttcat

SEQ ID NO: 1270 - DNA, 60 bp, Homo sapiens
atgaggctgtggaagagcaaaatgagtttcgacatggtggtataccatggtggtgatact

SEQ ID NO: 1271 - DNA, 60 bp, Homo sapiens
agtactctttgttgtcatttagtatgtatcgaggtcaatgtcgcatagctaataagacct

SEQ ID NO: 1272 - DNA, 60 bp, Homo sapiens
aaactagagggatctaccagaggaggtgtcgatttgttgaatgttcttcagggatagcct

SEQ ID NO: 1273 - DNA, 60 bp, Homo sapiens
agcaaggaacataattatggctgtgctttcgatgatgcagttgcttttgaaactctttaa

SEQ ID NO: 1274 - DNA, 60 bp, Homo sapiens
agctgttcctttaatcttcccagcactatcgagtgccactatttttaaacagatcttaaa

SEQ ID NO: 1275 - DNA, 60 bp, Homo sapiens
agctgttcctttaatcttcccagcactatcgatcataaattagtaaattgaaagatcaag

SEQ ID NO: 1276 - DNA, 60 bp, Homo sapiens
gccatcagatctcccacatgaggcattttcgacctcaaccaggtcaaagggaacaaaggg

SEQ ID NO: 1277 - DNA, 60 bp, Homo sapiens
attcagggcgggggtcctcttgccaagatcgatagaccactagcaagactaataaagaag

SEQ ID NO: 1278 - DNA, 60 bp, Homo sapiens
ttgtggtgagaacgatacaggagacagctcgaatgtgcaaagtataacaaaaagataggt

SEQ ID NO: 1279 - DNA, 23 bp, Homo sapiens
ggcaaagagcagacagggaaagg

SEQ ID NO: 1280 - DNA, 23 bp, Homo sapiens
ctctcccttctctcctaccctgc

SEQ ID NO: 1281 - DNA, 26 bp, Homo sapiens
tgacagcagaaggagcaggaccacaa

SEQ ID NO: 1282 - DNA, 26 bp, Homo sapiens
aggatggtgacccttgtatcagttag

SEQ ID NO: 1283 - DNA, 23 bp, Homo sapiens
acagggaaagggaggcagaaggg

SEQ ID NO: 1284 - DNA, 23 bp, Homo sapiens
gtccatctgtccagtcaggtcct

SEQ ID NO: 1285 - DNA, 24 bp, Homo sapiens
attgatgatctcgcgagacgcttt

SEQ ID NO: 1286 - DNA, 25 bp, Homo sapiens
aaaggcgtccagtctcgtgtataag

SEQ ID NO: 1287 - DNA, 26 bp, Homo sapiens
aaagagcagacagggaaagggaggca

SEQ ID NO: 1288 - DNA, 26 bp, Homo sapiens
tattctttcccagagtcccatcttgg

SEQ ID NO: 1289 - DNA, 23 bp, Homo sapiens
gacgcaggaatggaagggaaagg

SEQ ID NO: 1290 - DNA, 23 bp, Homo sapiens
ctccatctcccacagcatccagc

SEQ ID NO: 1291 - DNA, 23 bp, Homo sapiens
tgaggcgtgtccgatgtgggaat

SEQ ID NO: 1292 - DNA, 23 bp, Homo sapiens
acgacatcgccgcagcactcatc

SEQ ID NO: 1293 - DNA, 24 bp, Homo sapiens
gagggagaaaggaatgaaggctgc

SEQ ID NO: 1294 - DNA, 26 bp, Homo sapiens
ggttgggttttctcaataatccatag

SEQ ID NO: 1295 - DNA, 26 bp, Homo sapiens
catagtggattgaaacagggtggagc

SEQ ID NO: 1296 - DNA, 26 bp, Homo sapiens
ggagaagaggactgtagaaggagaca

SEQ ID NO: 1297 - DNA, 23 bp, Homo sapiens
ccccacaagcccacaaaagccat

SEQ ID NO: 1298 - DNA, 23 bp, Homo sapiens
ccgcccatctgtaagcccatctc

SEQ ID NO: 1299 - DNA, 23 bp, Homo sapiens
acaagacctctcctccctgagtc

SEQ ID NO: 1300 - DNA, 23 bp, Homo sapiens
gctgttcctgcctctctgctacg

SEQ ID NO: 1301 - DNA, 24 bp, Homo sapiens
ctcgcctgacagacgttattgtct

SEQ ID NO: 1302 - DNA, 23 bp, Homo sapiens
cacaggcaaaaatgtaactttcc

SEQ ID NO: 1303 - DNA, 23 bp, Homo sapiens
aggtggagcccatcaagcggtat

SEQ ID NO: 1304 - DNA, 23 bp, Homo sapiens
tgaagtggcatctctctcccgcc

SEQ ID NO: 1305 - DNA, 23 bp, Homo sapiens
tgaccttccccgcagacagtgct

SEQ ID NO: 1306 - DNA, 23 bp, Homo sapiens
gtttggtagtggctgtctggagc

SEQ ID NO: 1307 - DNA, 23 bp, Homo sapiens
gagacaggcaggtgagagaaagg

SEQ ID NO: 1308 - DNA, 23 bp, Homo sapiens
atccgcctccacacacccacact

SEQ ID NO: 1309 - DNA, 23 bp, Homo sapiens
ggacagtttccataactgctggc

SEQ ID NO: 1310 - DNA, 25 bp, Homo sapiens
taacgcccatctacacttagctata

SEQ ID NO: 1311 - DNA, 23 bp, Homo sapiens
gaggtgctggagtgtggctgtga

SEQ ID NO: 1312 - DNA, 23 bp, Homo sapiens
cgcttgagttggtgctgaatgcc

SEQ ID NO: 1313 - DNA, 23 bp, Homo sapiens
ttggctgaccttgggtgtggtgt

SEQ ID NO: 1314 - DNA, 23 bp, Homo sapiens
tgaagtggcatctctctcccgcc

SEQ ID NO: 1315 - DNA, 23 bp, Homo sapiens
tgaggcgtgtccgatgtgggaat

SEQ ID NO: 1316 - DNA, 23 bp, Homo sapiens
tgggagagcactcgggaacctca

SEQ ID NO: 1317 - DNA, 23 bp, Homo sapiens
gagacaggcaggtgagagaaagg

SEQ ID NO: 1318 - DNA, 23 bp, Homo sapiens
cctttccgctacctggctgtggt

SEQ ID NO: 1319 - DNA, 25 bp, Homo sapiens
aaatcgaatcacttcatcgaattct

SEQ ID NO: 1320 - DNA, 25 bp, Homo sapiens
ttgaacactcggtcgaaggcgctcg

SEQ ID NO: 1321 - DNA, 23 bp, Homo sapiens
agcaaggtgaggtgacagggagc

SEQ ID NO: 1322 - DNA, 23 bp, Homo sapiens
cctggaagatgtgggaggctgtt

SEQ ID NO: 1323 - DNA, 24 bp, Homo sapiens
tagagtacgtgtcccaactgttgc

SEQ ID NO: 1324 - DNA, 24 bp, Homo sapiens
gcacgctactgttacgagattcct

SEQ ID NO: 1325 - DNA, 23 bp, Homo sapiens
taagcgcgcgtacagtagggcga

SEQ ID NO: 1326 - DNA, 23 bp, Homo sapiens
ccgaagaaaagttaagcccctcg

SEQ ID NO: 1327 - DNA, 23 bp, Homo sapiens
gatgggagacaggcaggtgagag

SEQ ID NO: 1328 - DNA, 23 bp, Homo sapiens
ctctggcttgaccttctccactg

SEQ ID NO: 1329 - DNA, 23 bp, Homo sapiens
agacatcctgagagaccagaggg

SEQ ID NO: 1330 - DNA, 23 bp, Homo sapiens
gcctggagcaacttcctgtgcca

SEQ ID NO: 1331 - DNA, 23 bp, Homo sapiens
aggaggagcagcaccagcactgt

SEQ ID NO: 1332 - DNA, 23 bp, Homo sapiens
ccttcctctgggctctctgtaac

SEQ ID NO: 1333 - DNA, 23 bp, Homo sapiens
tacaggtttgaggtgcccgtcgc

SEQ ID NO: 1334 - DNA, 23 bp, Homo sapiens
ggcttccagtgtagaggttaccc

SEQ ID NO: 1335 - DNA, 23 bp, Homo sapiens
gagggacgcaggaatggaaggga

SEQ ID NO: 1336 - DNA, 23 bp, Homo sapiens
gtgtgttttgaggagcacccagc

SEQ ID NO: 1337 - DNA, 23 bp, Homo sapiens
acaagacctctcctccctgagtc

SEQ ID NO: 1338 - DNA, 23 bp, Homo sapiens
cctggtggacttggcttcgttcc

SEQ ID NO: 1339 - DNA, 23 bp, Homo sapiens
gtgccgctgtgtaggaaagaagc

SEQ ID NO: 1340 - DNA, 23 bp, Homo sapiens
ggtgttgaggtccagtcttccgc

SEQ ID NO: 1341 - DNA, 26 bp, Homo sapiens
atggacaaccaggtggcaggaaaggt

SEQ ID NO: 1342 - DNA, 26 bp, Homo sapiens
aaagtatgtagcaaagcaccccactg

SEQ ID NO: 1343 - DNA, 23 bp, Homo sapiens
aaggtaaccatcggagcccgtga

SEQ ID NO: 1344 - DNA, 25 bp, Homo sapiens
ctggcatgaaatactacgggccttc

SEQ ID NO: 1345 - DNA, 23 bp, Homo sapiens
taccaagagggtggcactgggct

SEQ ID NO: 1346 - DNA, 24 bp, Homo sapiens
cgtgtggttatggaatcagggtgc

SEQ ID NO: 1347 - DNA, 23 bp, Homo sapiens
ctgaggcgtgtccgatgtgggaa

SEQ ID NO: 1348 - DNA, 23 bp, Homo sapiens
aaggacttgagcaggtgatgggc

SEQ ID NO: 1349 - DNA, 23 bp, Homo sapiens
cccaacataaggcaactcatgcg

SEQ ID NO: 1350 - DNA, 25 bp, Homo sapiens
atgattgccgcattttcacggttgc

SEQ ID NO: 1351 - DNA, 24 bp, Homo sapiens
ggatacacatgcgcctcggtccga

SEQ ID NO: 1352 - DNA, 24 bp, Homo sapiens
tcatcaagcccgccaacgggttag

SEQ ID NO: 1353 - DNA, 23 bp, Homo sapiens
cgggtgccgctgtgtaggaaaga

SEQ ID NO: 1354 - DNA, 23 bp, Homo sapiens
ggagtccttcaccacacagtcac

SEQ ID NO: 1355 - DNA, 26 bp, Homo sapiens
acacaagagagagagacgcaggtgac

SEQ ID NO: 1356 - DNA, 26 bp, Homo sapiens
cagccaggtagaaatgaatacagggt

SEQ ID NO: 1357 - DNA, 23 bp, Homo sapiens
gatgggagacaggcaggtgagag

SEQ ID NO: 1358 - DNA, 23 bp, Homo sapiens
gcagacaaaggctgagagagagg

SEQ ID NO: 1359 - DNA, 23 bp, Homo sapiens
ctgccaatgagagtgtcagcccg

SEQ ID NO: 1360 - DNA, 23 bp, Homo sapiens
cagtggatggtggaaaccctgga

SEQ ID NO: 1361 - DNA, 25 bp, Homo sapiens
ggaacgaatatgaggcagactctca

SEQ ID NO: 1362 - DNA, 23 bp, Homo sapiens
atcgctatctgtccgtaacgtcg

SEQ ID NO: 1363 - DNA, 26 bp, Homo sapiens
aaggcagagaacaaaacacagaggtg

SEQ ID NO: 1364 - DNA, 26 bp, Homo sapiens
gcaggaaagactcaagcactctggac

SEQ ID NO: 1365 - DNA, 25 bp, Homo sapiens
cacagaaggcgtgcgagcaccaatg

SEQ ID NO: 1366 - DNA, 25 bp, Homo sapiens
ctatcatcggtcacttgtgttaggt

SEQ ID NO: 1367 - DNA, 23 bp, Homo sapiens
gactgggagcagggttttgatgg

SEQ ID NO: 1368 - DNA, 23 bp, Homo sapiens
gcctcactgtctcagccctgcta

SEQ ID NO: 1369 - DNA, 23 bp, Homo sapiens
ttggaggtggaggtctgccaggt

SEQ ID NO: 1370 - DNA, 23 bp, Homo sapiens
tgtccccttctactaccccacct

SEQ ID NO: 1371 - DNA, 23 bp, Homo sapiens
gactgggagcagggttttgatgg

SEQ ID NO: 1372 - DNA, 23 bp, Homo sapiens
ccccaagcaggctctggcacata

SEQ ID NO: 1373 - DNA, 24 bp, Homo sapiens
taccaaagctgagagtcgtctatc

SEQ ID NO: 1374 - DNA, 25 bp, Homo sapiens
tatcttctaatagtacctctattaa

SEQ ID NO: 1375 - DNA, 23 bp, Homo sapiens
cattgccactcccagtcgggcta

SEQ ID NO: 1376 - DNA, 23 bp, Homo sapiens
gggaaggaaaagagggcaagtcc

SEQ ID NO: 1377 - DNA, 23 bp, Homo sapiens
ttggaggtggaggtctgccaggt

SEQ ID NO: 1378 - DNA, 23 bp, Homo sapiens
ggtccactggcaatcaccctact

SEQ ID NO: 1379 - DNA, 24 bp, Homo sapiens
attgagttgttgaccctacaagca

SEQ ID NO: 1380 - DNA, 24 bp, Homo sapiens
taagccgacaggaccgaacggtca

SEQ ID NO: 1381 - DNA, 23 bp, Homo sapiens
atcgtcgtcgctcctcaaacttg

SEQ ID NO: 1382 - DNA, 23 bp, Homo sapiens
tgtggcgttcacgattcaggcat

SEQ ID NO: 1383 - DNA, 25 bp, Homo sapiens
cgctctatcaactctagaatgttgt

SEQ ID NO: 1384 - DNA, 25 bp, Homo sapiens
atacaaggccaatcgtgcggatgcg

SEQ ID NO: 1385 - DNA, 23 bp, Homo sapiens
gtgctcaggacgacagtctggga

SEQ ID NO: 1386 - DNA, 23 bp, Homo sapiens
agcagaaggagcaggaccacaag

SEQ ID NO: 1387 - DNA, 24 bp, Homo sapiens
caggggcccttctaacgaagcggg

SEQ ID NO: 1388 - DNA, 24 bp, Homo sapiens
tgctggatatcctagtgagcgcga

SEQ ID NO: 1389 - DNA, 23 bp, Homo sapiens
gctgcttgcttgtgggacttgcc

SEQ ID NO: 1390 - DNA, 23 bp, Homo sapiens
agcagaaggagcaggaccacaag

SEQ ID NO: 1391 - DNA, 25 bp, Homo sapiens
caagtcgcagctcggggcagatctt

SEQ ID NO: 1392 - DNA, 23 bp, Homo sapiens
atgggaactaagggtgagtagta

SEQ ID NO: 1393 - DNA, 24 bp, Homo sapiens
atgggcgctcttactccgttgggc

SEQ ID NO: 1394 - DNA, 24 bp, Homo sapiens
agcatgtgggacgtagtcggagag

SEQ ID NO: 1395 - DNA, 25 bp, Homo sapiens
cttaaagactgtccatttgacaaca

SEQ ID NO: 1396 - DNA, 24 bp, Homo sapiens
attttcacgtagatcataaccggt

SEQ ID NO: 1397 - DNA, 25 bp, Homo sapiens
tcatcggcgggaggcggtcccaggc

SEQ ID NO: 1398 - DNA, 25 bp, Homo sapiens
tctcagaaaagctctggagccaccc

SEQ ID NO: 1399 - DNA, 24 bp, Homo sapiens
ccaaatcgcagcgtagggctagga

SEQ ID NO: 1400 - DNA, 23 bp, Homo sapiens
cctctctgagagtcggatctcgc

SEQ ID NO: 1401 - DNA, 24 bp, Homo sapiens
tccagtaaagggccgggaggttat

SEQ ID NO: 1402 - DNA, 23 bp, Homo sapiens
gaaactgttcagctctggcaaga

SEQ ID NO: 1403 - DNA, 23 bp, Homo sapiens
aaccgcacatagtaaatagctca

SEQ ID NO: 1404 - DNA, 24 bp, Homo sapiens
cgtaccaaattccgttttataagg

SEQ ID NO: 1405 - DNA, 23 bp, Homo sapiens
ggtgatgagcaaagaagtggaaa

SEQ ID NO: 1406 - DNA, 24 bp, Homo sapiens
gaaataagcaggtcccgttacctc

SEQ ID NO: 1407 - DNA, 24 bp, Homo sapiens
gctttagtgttgaaatctcccttg

SEQ ID NO: 1408 - DNA, 25 bp, Homo sapiens
aattggcttaactgtagcatgcaca

SEQ ID NO: 1409 - DNA, 23 bp, Homo sapiens
cagtttctgaccggccgtgggcc

SEQ ID NO: 1410 - DNA, 24 bp, Homo sapiens
atccaaacacaaatcgctgtggca

SEQ ID NO: 1411 - DNA, 24 bp, Homo sapiens
tcgcgatgaatggggtgagcggga

SEQ ID NO: 1412 - DNA, 23 bp, Homo sapiens
atatgtcctcgttactattggtt

SEQ ID NO: 1413 - DNA, 23 bp, Homo sapiens
ctgaggcgtgtccgatgtgggaa

SEQ ID NO: 1414 - DNA, 23 bp, Homo sapiens
gtttgctgtcctccatcctccca

SEQ ID NO: 1415 - DNA, 25 bp, Homo sapiens
cgcgaaggaggtgcaaggcccaaag

SEQ ID NO: 1416 - DNA, 23 bp, Homo sapiens
aaggggtcaaggacctacatcaa

SEQ ID NO: 1417 - DNA, 23 bp, Homo sapiens
acagggaaagggaggcagaaggg

SEQ ID NO: 1418 - DNA, 23 bp, Homo sapiens
ttaccacgccaatcccagccctt

SEQ ID NO: 1419 - DNA, 24 bp, Homo sapiens
gatggagcagaacaggaagttggg

SEQ ID NO: 1420 - DNA, 23 bp, Homo sapiens
tgaagtggcatctctctcccgcc

SEQ ID NO: 1421 - DNA, 23 bp, Homo sapiens
ccaggtgaggttggcagcaagca

SEQ ID NO: 1422 - DNA, 23 bp, Homo sapiens
ccctgcctcttcacaaagcaagc

SEQ ID NO: 1423 - DNA, 23 bp, Homo sapiens
ggatggatgtgggaatggatggg

SEQ ID NO: 1424 - DNA, 23 bp, Homo sapiens
ctgaggcgtgtccgatgtgggaa

SEQ ID NO: 1425 - DNA, 23 bp, Homo sapiens
tatctcaggtatcttgaaagatt

SEQ ID NO: 1426 - DNA, 23 bp, Homo sapiens
tggaagagactatactcaggtta

SEQ ID NO: 1427 - DNA, 24 bp, Homo sapiens
cacccgtgctagtgtcgtatactg

SEQ ID NO: 1428 - DNA, 25 bp, Homo sapiens
tcaaatctagatgtatcatgcgcaa

SEQ ID NO: 1429 - DNA, 24 bp, Homo sapiens
gaaatagagggcttactatatgtt

SEQ ID NO: 1430 - DNA, 23 bp, Homo sapiens
ctcgcttaagcaggtgcgtgctt

SEQ ID NO: 1431 - DNA, 23 bp, Homo sapiens
atcaaaatcgtagccgcatggca

SEQ ID NO: 1432 - DNA, 25 bp, Homo sapiens
gggccatttaaagaaagaggaacag

SEQ ID NO: 1433 - DNA, 25 bp, Homo sapiens
cggtcccgcagctccggttaacgct

SEQ ID NO: 1434 - DNA, 24 bp, Homo sapiens
agtatcagttcgcctgtgagcagc

SEQ ID NO: 1435 - DNA, 23 bp, Homo sapiens
gatgggagacaggcaggtgagag

SEQ ID NO: 1436 - DNA, 23 bp, Homo sapiens
tgtcacctcttccaccctctcag

SEQ ID NO: 1437 - DNA, 26 bp, Homo sapiens
tcacctctcctccgtcccaccatttt

SEQ ID NO: 1438 - DNA, 26 bp, Homo sapiens
acaatctctccactaagcaaaccctg

SEQ ID NO: 1439 - DNA, 26 bp, Homo sapiens
gaccaaagcacctctgaaggacaaag

SEQ ID NO: 1440 - DNA, 26 bp, Homo sapiens
cacatacaaagcatcattccaggtgc

SEQ ID NO: 1441 - DNA, 26 bp, Homo sapiens
gaccaaagcacctctgaaggacaaag

SEQ ID NO: 1442 - DNA, 26 bp, Homo sapiens
cctcagggaaagggaaaaccaagagt

SEQ ID NO: 1443 - DNA, 26 bp, Homo sapiens
tcctaactggattgccacacttggtg

SEQ ID NO: 1444 - DNA, 26 bp, Homo sapiens
ccctgggactaacactttctgtgatg

SEQ ID NO: 1445 - DNA, 23 bp, Homo sapiens
gctaatacctgtaagaggtagtt

SEQ ID NO: 1446 - DNA, 24 bp, Homo sapiens
accccgtcattcataccgagaacc

SEQ ID NO: 1447 - DNA, 23 bp, Homo sapiens
tgagtgagcagtgagcggtggca

SEQ ID NO: 1448 - DNA, 26 bp, Homo sapiens
ccaaaagaaaactgaccccttagagg

SEQ ID NO: 1449 - DNA, 26 bp, Homo sapiens
cttttgagaatgccgaggtaatgggc

SEQ ID NO: 1450 - DNA, 26 bp, Homo sapiens
tgctattatctggtgactggactggg

SEQ ID NO: 1451 - DNA, 26 bp, Homo sapiens
agaatcacctactcagggacacactg

SEQ ID NO: 1452 - DNA, 26 bp, Homo sapiens
gaaaggttatccagaatacagaaggg

SEQ ID NO: 1453 - DNA, 25 bp, Homo sapiens
gccctaaggctctctggagcggagt

SEQ ID NO: 1454 - DNA, 23 bp, Homo sapiens
ataactgacacattgttacaaaa

SEQ ID NO: 1455 - DNA, 23 bp, Homo sapiens
agcaaggtgaggtgacagggagc

SEQ ID NO: 1456 - DNA, 23 bp, Homo sapiens
gctctcccttgtagcctgttagg

SEQ ID NO: 1457 - DNA, 23 bp, Homo sapiens
acagcaaggtgaggtgacaggga

SEQ ID NO: 1458 - DNA, 23 bp, Homo sapiens
tggcagcatcgcaccatccccat

SEQ ID NO: 1459 - DNA, 23 bp, Homo sapiens
gcgcggaaaagtcaatagaagat

SEQ ID NO: 1460 - DNA, 23 bp, Homo sapiens
tgctattggctaaaattagaaag

SEQ ID NO: 1461 - DNA, 23 bp, Homo sapiens
gggaggactctggtctcagggat

SEQ ID NO: 1462 - DNA, 23 bp, Homo sapiens
caaggaatgcccgagtcaggtga

SEQ ID NO: 1463 - DNA, 25 bp, Homo sapiens
tctcttaccatcaattgacatcttt

SEQ ID NO: 1464 - DNA, 25 bp, Homo sapiens
atacctgcaaccccgcaactgtcct

SEQ ID NO: 1465 - DNA, 23 bp, Homo sapiens
agcaaggtgaggtgacagggagc

SEQ ID NO: 1466 - DNA, 23 bp, Homo sapiens
aagagtaggaaacccctggcagc

SEQ ID NO: 1467 - DNA, 26 bp, Homo sapiens
gaccaaagcacctctgaaggacaaag

SEQ ID NO: 1468 - DNA, 26 bp, Homo sapiens
gaacatctacttcaacctcctgccca

SEQ ID NO: 1469 - DNA, 23 bp, Homo sapiens
gttcccgccttcctccatcttgc

SEQ ID NO: 1470 - DNA, 23 bp, Homo sapiens
ccccttgcctcttgtttgaagcc

SEQ ID NO: 1471 - DNA, 25 bp, Homo sapiens
ctccccgagaccgataagcaatcag

SEQ ID NO: 1472 - DNA, 23 bp, Homo sapiens
tgaaggtgtaatcagtttgagta

SEQ ID NO: 1473 - DNA, 23 bp, Homo sapiens
acaggtgggtccgcacagtcgcc

SEQ ID NO: 1474 - DNA, 25 bp, Homo sapiens
tcctgtcccgacaatgcgggtggca

SEQ ID NO: 1475 - DNA, 25 bp, Homo sapiens
ataaatgtgtcccaggataggaggc

SEQ ID NO: 1476 - DNA, 26 bp, Homo sapiens
gttttcagtggaatagagagatgtgt

SEQ ID NO: 1477 - DNA, 25 bp, Homo sapiens
ccagtcgattgataaggcggcgcac

SEQ ID NO: 1478 - DNA, 24 bp, Homo sapiens
aacgccaaccttgtgctaagcacc

SEQ ID NO: 1479 - DNA, 25 bp, Homo sapiens
ataaatgtgtcccaggataggaggc

SEQ ID NO: 1480 - DNA, 26 bp, Homo sapiens
aatgctcctcctttccttcagtcccc

SEQ ID NO: 1481 - DNA, 26 bp, Homo sapiens
tcccaacatttgccaccacctactcc

SEQ ID NO: 1482 - DNA, 26 bp, Homo sapiens
gagaaaataatggtgggaagttaggg

SEQ ID NO: 1483 - DNA, 23 bp, Homo sapiens
agtcgtccggagacgtggttcct

SEQ ID NO: 1484 - DNA, 24 bp, Homo sapiens
taaagcctcgttattgatccggtt

SEQ ID NO: 1485 - DNA, 23 bp, Homo sapiens
gatgggagacaggcaggtgagag

SEQ ID NO: 1486 - DNA, 23 bp, Homo sapiens
ttctcctgtgacaactccctggg

SEQ ID NO: 1487 - DNA, 23 bp, Homo sapiens
gctgtcttccccgtcacacatcc

SEQ ID NO: 1488 - DNA, 23 bp, Homo sapiens
ccaaggcaaagcacgaaggatgc

SEQ ID NO: 1489 - DNA, 24 bp, Homo sapiens
gaagaccaggagaggcatcaactg

SEQ ID NO: 1490 - DNA, 23 bp, Homo sapiens
gcctttctttgcccagtattagc

SEQ ID NO: 1491 - DNA, 26 bp, Homo sapiens
cgcaatgactggaacgggattctcta

SEQ ID NO: 1492 - DNA, 26 bp, Homo sapiens
cacttggagttgatgacttgcctgac

SEQ ID NO: 1493 - DNA, 23 bp, Homo sapiens
tgaagtggcatctctctcccgcc

SEQ ID NO: 1494 - DNA, 23 bp, Homo sapiens
tccactgccctgcttctcaccaa

SEQ ID NO: 1495 - DNA, 23 bp, Homo sapiens
tctcctgctccccactccacagt

SEQ ID NO: 1496 - DNA, 23 bp, Homo sapiens
ccagcacagagtgtccgtttcca

SEQ ID NO: 1497 - DNA, 23 bp, Homo sapiens
tcagcagggcaggaacacagtgg

SEQ ID NO: 1498 - DNA, 23 bp, Homo sapiens
cacagcagaggacctattcccag

SEQ ID NO: 1499 - DNA, 23 bp, Homo sapiens
tggcaggagtagccgtgaaaggc

SEQ ID NO: 1500 - DNA, 23 bp, Homo sapiens
ggctgggactgtgaaacctggaa

SEQ ID NO: 1501 - DNA, 23 bp, Homo sapiens
gggcagacaggcagaaggacaga

SEQ ID NO: 1502 - DNA, 23 bp, Homo sapiens
gacagatggcactacagaagggc

SEQ ID NO: 1503 - DNA, 26 bp, Homo sapiens
aggcgacagggttcgggctttattct

SEQ ID NO: 1504 - DNA, 26 bp, Homo sapiens
ctctgataacatcttccctctacacg

SEQ ID NO: 1505 - DNA, 26 bp, Homo sapiens
cccgtcacacatccaaacaagagcat

SEQ ID NO: 1506 - DNA, 26 bp, Homo sapiens
gaacctatgaaggaccactaaggagc

SEQ ID NO: 1507 - DNA, 26 bp, Homo sapiens
ccccgtcacacatccaaacaagagca

SEQ ID NO: 1508 - DNA, 26 bp, Homo sapiens
catttacttttacctctccttccagc

SEQ ID NO: 1509 - DNA, 25 bp, Homo sapiens
ataaatgtgtcccaggataggaggc

SEQ ID NO: 1510 - DNA, 26 bp, Homo sapiens
ttatccccttcctcaatcccacctcc

SEQ ID NO: 1511 - DNA, 24 bp, Homo sapiens
tcaccccgctcgtgtagaacagcg

SEQ ID NO: 1512 - DNA, 24 bp, Homo sapiens
aaaacgaacaccgagaatgcagaa

SEQ ID NO: 1513 - DNA, 26 bp, Homo sapiens
tagagaacaagaggtgctggagtgtg

SEQ ID NO: 1514 - DNA, 26 bp, Homo sapiens
tcacatcctccttgaactattctgta

SEQ ID NO: 1515 - DNA, 60 bp, Homo sapiens
ttgccccagtgactgtttgagcagtgcctcgaatgattataacatataggtaagtaaaat

SEQ ID NO: 1516 - DNA, 60 bp, Homo sapiens
gatctcactacgttgccctaggctggtctcgaactcctgacttcgggtgatccctcccat

SEQ ID NO: 1517 - DNA, 60 bp, Homo sapiens
cccagctcctgcaaaactcctcctgacttcgacactgaaaacctgtgtatgaagtcaccg

SEQ ID NO: 1518 - DNA, 60 bp, Homo sapiens
gagacgcgggagaaaagtaggaaataaatcgagcaacaaagggccatagggtgactgtat

SEQ ID NO: 1519 - DNA, 60 bp, Homo sapiens
caaagcagaggaacacagcaaaacacattcgaaagaaagcataatagaagttaaaacatc

SEQ ID NO: 1520 - DNA, 60 bp, Homo sapiens
gtcccaagtggcatgagaggtagactcatcgatgttcgggggtagaaagtgctctggatg

SEQ ID NO: 1521 - DNA, 60 bp, Homo sapiens
gacagctggctcttcatcacaatcattctcgatatttcactcttggggcttataatctag

SEQ ID NO: 1522 - DNA, 60 bp, Homo sapiens
tgaccccaagcattctggcctgaacgattcgagtatgaacggaaaattgactagccctca

SEQ ID NO: 1523 - DNA, 60 bp, Homo sapiens
tgctgcttcaggatcctcaaggccagtctcgatatcttcggcgcctgaggggacgacgag

SEQ ID NO: 1524 - DNA, 60 bp, Homo sapiens
caaagcagaggaacacagcaaaacacattcgagaagctgggaacacactgaagaagtggg

SEQ ID NO: 1525 - DNA, 60 bp, Homo sapiens
gccaggatagggaagaagcagattgatatcgaattcaaagcttatttaaaggttatatat

SEQ ID NO: 1526 - DNA, 60 bp, Homo sapiens
gccatcagatctcccacatgaggcattttcgatagtctactaaacatgccatgattaaat

SEQ ID NO: 1527 - DNA, 60 bp, Homo sapiens
gcaattccatttggatcccctgattgagtcgatgaaatgcccaagctaaggtaggagcta

SEQ ID NO: 1528 - DNA, 60 bp, Homo sapiens
ggagacagggttacatcagccagtaacatcgagaaaggatagctgggtcttcccatgatg

SEQ ID NO: 1529 - DNA, 60 bp, Homo sapiens
tctggctctatcaagctctatttaatagtcgaatttacagctggctaacagaggcccaga

SEQ ID NO: 1530 - DNA, 60 bp, Homo sapiens
cccgcgctagtaactgagctttcagtcatcgatgtgaaaatcctcagtaaaatactgtca

SEQ ID NO: 1531 - DNA, 60 bp, Homo sapiens
tgccctgcatgtccaagggaaggagcggtcgaggttcgcaaacctcagtttttgacttct

SEQ ID NO: 1532 - DNA, 60 bp, Homo sapiens
gagaaggggaaacacaatgtgtctgttatcgatgatttcacgttggtgaagttggtcaga

SEQ ID NO: 1533 - DNA, 60 bp, Homo sapiens
gagctggagaaagccttgaactctatcatcgactctattgtttttcttattgttttcttc

SEQ ID NO: 1534 - DNA, 60 bp, Homo sapiens
gttggaaggaatccagggtaagggatattcgagacctagataggtcctccttttaccatg

SEQ ID NO: 1535 - DNA, 60 bp, Homo sapiens
cagcaaagttttattgtaaaataagagatcgaggatgaggtaaaggtctcggaggataag

SEQ ID NO: 1536 - DNA, 60 bp, Homo sapiens
ggaggggcaactgctaagtgtatgattatcgattccaactttaatgacaaacactggtcc

SEQ ID NO: 1537 - DNA, 60 bp, Homo sapiens
gttggaaggaatccagggtaagggatattcgattgttatggaagggatttatacttgaat

SEQ ID NO: 1538 - DNA, 60 bp, Homo sapiens
gtgtggtttagtgcaagtttttcacctctcgaggagctaaaagcgaaggccgcggggaag

SEQ ID NO: 1539 - DNA, 60 bp, Homo sapiens
gccaagaggggaaaggactcatgttctctcgaggtctagaatctgagacctaaatgaatt

SEQ ID NO: 1540 - DNA, 60 bp, Homo sapiens
caaagcagtcaaggcccaaagacaaccctcgagtttggtttgtcttgaataaactgaggt

SEQ ID NO: 1541 - DNA, 60 bp, Homo sapiens
caaagcagtcaaggcccaaagacaaccctcgacacctgttcttcacatgcacatccaacc

SEQ ID NO: 1542 - DNA, 60 bp, Homo sapiens
aaggggagctcatttagttcataagcggtcgaccatcacctccagggagatccagacagc

SEQ ID NO: 1543 - DNA, 60 bp, Homo sapiens
gccaggatagggaagaagcagattgatatcgaccagtatttcccaattggggttcatggg

SEQ ID NO: 1544 - DNA, 60 bp, Homo sapiens
ttgtggtgagaacgatacaggagacagctcgattctaagctaagcaatttggttttgttt

SEQ ID NO: 1545 - DNA, 60 bp, Homo sapiens
cacatccctgtctagtcctatctgttcatcgaaatatttcattaacatccacacacacac

SEQ ID NO: 1546 - DNA, 60 bp, Homo sapiens
ttaaaaattcccaagatggaaaaagagatcgatccttcgcccttcaaatgtccacttcgg

SEQ ID NO: 1547 - DNA, 60 bp, Homo sapiens
cacatccctgtctagtcctatctgttcatcgagagataccctacttgctatcatcatggg

SEQ ID NO: 1548 - DNA, 60 bp, Homo sapiens
aggagttcaccagggagaaaagaagaaatcgagcccgtcctgggagagcgttgggggtct

SEQ ID NO: 1549 - DNA, 60 bp, Homo sapiens
tgttagtagagaccatgttaggctggtctcgaactcccagcctcaggtaatctgctctcc

SEQ ID NO: 1550 - DNA, 60 bp, Homo sapiens
gaacctcacaagcctcagcaaattcccatcgaggagctaaaagcgaaggccgcggggaag

SEQ ID NO: 1551 - DNA, 60 bp, Homo sapiens
cgtctcaatggctcccaactcttttgcctcgagcctggtttgtgtgttttatccagaagt

SEQ ID NO: 1552 - DNA, 60 bp, Homo sapiens
gagacgcgggagaaaagtaggaaataaatcgaggagagaaaacaaggtgtgaaagatcca

SEQ ID NO: 1553 - DNA, 60 bp, Homo sapiens
ccatcccaaagtgccccgtgctgaagggtcgaggatgaggtaaaggtctcggaggataag

SEQ ID NO: 1554 - DNA, 60 bp, Homo sapiens
cggagggtataataactgctgttgtgtatcgaggcacaggtaatttgcccaaggttacac

SEQ ID NO: 1555 - DNA, 60 bp, Homo sapiens
acaggaggctcctctaacacatctcctctcgactgttccggtctcatcacagggagggca

SEQ ID NO: 1556 - DNA, 60 bp, Homo sapiens
gcgtgagtgaagaccttgctgtataacctcgaggtataaccgtcggcagaagaaaagggt

SEQ ID NO: 1557 - DNA, 60 bp, Homo sapiens
gcatctccgtgagaggcatttgcatagctcgagttctcatttagctttcacttataaatg

SEQ ID NO: 1558 - DNA, 60 bp, Homo sapiens
gccatcagatctcccacatgaggcattttcgagcctccgttcaaattgatcatcatcaaa

SEQ ID NO: 1559 - DNA, 60 bp, Homo sapiens
aattttcttcaaatggttctgtcttcaatcgagcgcccaacctacaccaacctcaatcgc

SEQ ID NO: 1560 - DNA, 60 bp, Homo sapiens
gtgttgtgtgaatttactctgataatgctcgacttgaaaacaagcactgcctcactgcaa

SEQ ID NO: 1561 - DNA, 60 bp, Homo sapiens
gagtttcaccaagttatctaggctggtctcgaactcctgagctcaggtgattcacttgcc

SEQ ID NO: 1562 - DNA, 60 bp, Homo sapiens
gccatcagatctcccacatgaggcattttcgactggccagctccggaagtcaaagttgta

SEQ ID NO: 1563 - DNA, 60 bp, Homo sapiens
cggagggtataataactgctgttgtgtatcgattaacttctgctccagctcagagacagc

SEQ ID NO: 1564 - DNA, 60 bp, Homo sapiens
gccccctgctcaacggcgcgcagtcccatcgaccacatgtttacattttgaagacatttg

SEQ ID NO: 1565 - DNA, 60 bp, Homo sapiens
ggttggaggatcacctgagcccgagaggtcgaggctggagacatgaatacctatttggaa

SEQ ID NO: 1566 - DNA, 60 bp, Homo sapiens
caaagcagaggaacacagcaaaacacattcgagtctgggctccttcttctgttcccccgc

SEQ ID NO: 1567 - DNA, 60 bp, Homo sapiens
gccgtctggatctccctggaggtgatggtcgattcatatgaatgctgtggtattataggt

SEQ ID NO: 1568 - DNA, 60 bp, Homo sapiens
gttgaaacaccattgaaataaatgttattcgatgactgaaagctcagttactagcgcggg

SEQ ID NO: 1569 - DNA, 60 bp, Homo sapiens
gggtctcctgctcaccttgttgtctaagtcgagcgcatggtgcaggaggcggagaagtac

SEQ ID NO: 1570 - DNA, 60 bp, Homo sapiens
aaagagacacttctgatccccgcaaacatcgacatcaactaatcttgcctttgtgagtta

SEQ ID NO: 1571 - DNA, 60 bp, Homo sapiens
cactccatggtctctccctcatccctaatcgagttggcaggtataaaacacctagaaact

SEQ ID NO: 1572 - DNA, 60 bp, Homo sapiens
tgaccccaagcattctggcctgaacgattcgaggtaactcctatctaatgggtttttctt

SEQ ID NO: 1573 - DNA, 60 bp, Homo sapiens
ggcagagggtttggctacaaaaggaccatcgataaacaggagacatgactgagatgacaa

SEQ ID NO: 1574 - DNA, 60 bp, Homo sapiens
gcagggacacttttcaagagttctgtgttcgatcataactcactgtggccttgatcttcc

SEQ ID NO: 1575 - DNA, 60 bp, Homo sapiens
gttgtcttactcctgaaggatgctgcagtcgaatgtgataactatgaagggagagatttt

SEQ ID NO: 1576 - DNA, 60 bp, Homo sapiens
tgatggtttagaatgcagctaccaattatcgaggatgaggtaaaggtctcggaggataag

SEQ ID NO: 1577 - DNA, 60 bp, Homo sapiens
gagaggccgttctaaaagcacatttgtatcgagtggctgctgcctgcagctaagtatttt

SEQ ID NO: 1578 - DNA, 60 bp, Homo sapiens
tcctagataaatagcttaaattttaggatcgagtatgaacggaaaattgactagccctca

SEQ ID NO: 1579 - DNA, 60 bp, Homo sapiens
ccgggggctcatactactgcaaatgcaatcgatcatcagttgtatcccttgtgcatagca

SEQ ID NO: 1580 - DNA, 60 bp, Homo sapiens
ggaagccactgaagaagctaaggaaagttcgaggatgaggtaaaggtctcggaggataag

SEQ ID NO: 1581 - DNA, 60 bp, Homo sapiens
agcaaggaacataattatggctgtgctttcgatttcccacaaataaatccagtaatcttg

SEQ ID NO: 1582 - DNA, 60 bp, Homo sapiens
tgcaaagactgactgacagaaacagatttcgaggacattttctgaaaaccactcttctct

SEQ ID NO: 1583 - DNA, 60 bp, Homo sapiens
gttcctaagacctttctttccacagatctcgattaaatttgataccccttcatgctaaaa

SEQ ID NO: 1584 - DNA, 60 bp, Homo sapiens
gactctgatgctggatgaactcccaccctcgatgtgatacgttatatcaacagaatgaag

SEQ ID NO: 1585 - DNA, 60 bp, Homo sapiens
aggtttttgtatctctgttctagggacatcgaccaacagaactatgcagagtttggctgg

SEQ ID NO: 1586 - DNA, 60 bp, Homo sapiens
aaagagacacttctgatccccgcaaacatcgacctaggttgtcatgtttgtaccacacag

SEQ ID NO: 1587 - DNA, 60 bp, Homo sapiens
ggagacagggttacatcagccagtaacatcgagtctacacactggcttgtgaacatgttg

SEQ ID NO: 1588 - DNA, 60 bp, Homo sapiens
gatgattccgtgcagtcatttaaacagttcgattctggaagacaaaacaaaggatcaacc

SEQ ID NO: 1589 - DNA, 60 bp, Homo sapiens
cacttcgctgtctaccatgtaccatgtatcgatgtctcaggtaatttatttttacagtag

SEQ ID NO: 1590 - DNA, 60 bp, Homo sapiens
aattttttttattcttagaagatgaatgtcgagtcactaagcaaagacaagacagggtta

SEQ ID NO: 1591 - DNA, 60 bp, Homo sapiens
aaactagagggatctaccagaggaggtgtcgagaaacacagtgaggaactgatctgtttt

SEQ ID NO: 1592 - DNA, 60 bp, Homo sapiens
caaggaacattggtgatttccttaccaatcgaaatatccatattgctttcacgccattgt

SEQ ID NO: 1593 - DNA, 60 bp, Homo sapiens
aattttctcccagaggatggggaaccaatcgagctatgcaaatgcctctcacggagatgc

SEQ ID NO: 1594 - DNA, 60 bp, Homo sapiens
aaaatgatcgggatataaatccaggcattcgagcttgtaatccagcactttgggagactg

SEQ ID NO: 1595 - DNA, 60 bp, Homo sapiens
actccctgctacatggcgcccagtcccatcgaccactctagatgtgtgacctcaacacaa

SEQ ID NO: 1596 - DNA, 60 bp, Homo sapiens
gccgtctggatctccctggaggtgatggtcgaactccaggtccctagagatttctcccct

SEQ ID NO: 1597 - DNA, 60 bp, Homo sapiens
caaagcagtcaaggcccaaagacaaccctcgaaagtcacaagaagcaccgtcgctctcgg

SEQ ID NO: 1598 - DNA, 60 bp, Homo sapiens
gccatcagatctcccacatgaggcattttcgatggctcagatcctgagatccaaggaaca

SEQ ID NO: 1599 - DNA, 60 bp, Homo sapiens
atagatgctcagaaagattcaattgaactcgatgagatgccggtgtcggggtggacttgc

SEQ ID NO: 1600 - DNA, 60 bp, Homo sapiens
tctgggcctctgttagccagctgtaaattcgagagaggttacgttacttgctcaacgtca

SEQ ID NO: 1601 - DNA, 60 bp, Homo sapiens
acaggaggctcctctaacacatctcctctcgaaagaacaaagcccaaattgtttaccacc

SEQ ID NO: 1602 - DNA, 60 bp, Homo sapiens
atacaagtggctggacagcgagaggacgtcgagcccagtgacaccattgagaatgtcaaa

SEQ ID NO: 1603 - DNA, 60 bp, Homo sapiens
cccagtcacgtaccctctgcttgctcaatcgatccaattaaaataacatacattatagac

SEQ ID NO: 1604 - DNA, 60 bp, Homo sapiens
cggagggtataataactgctgttgtgtatcgaagtgcagcaaagaggtaatttctgtcaa

SEQ ID NO: 1605 - DNA, 60 bp, Homo sapiens
tcacactgctcatagcgtttgtttattctcgaagtagagtattgctctctgcactttgtt

SEQ ID NO: 1606 - DNA, 60 bp, Homo sapiens
gccaggatagggaagaagcagattgatatcgaggacagtaggctttcccagagagagtct

SEQ ID NO: 1607 - DNA, 60 bp, Homo sapiens
tgaccccaagcattctggcctgaacgattcgaatcttccttgcatctcaaggataagtcc

SEQ ID NO: 1608 - DNA, 60 bp, Homo sapiens
caaagcagtcaaggcccaaagacaaccctcgaggggtttcaaacgccaccaaggagccca

SEQ ID NO: 1609 - DNA, 60 bp, Homo sapiens
cggattctggttacagagagggatgagatcgagctggatatcaaggaggcaaagaaggag

SEQ ID NO: 1610 - DNA, 60 bp, Homo sapiens
atgaggctgtggaagagcaaaatgagtttcgattaatggcctgcaattgtcattgttgcc

SEQ ID NO: 1611 - DNA, 60 bp, Homo sapiens
ggcacgtagatgacttgagctcaggagttcgagaccaaacagctcctcctagttgtcatt

SEQ ID NO: 1612 - DNA, 60 bp, Homo sapiens
caaagcagaggaacacagcaaaacacattcgaaagaaaaaagaaaaaaaaaggctcaagg

SEQ ID NO: 1613 - DNA, 60 bp, Homo sapiens
tgaccccaagcattctggcctgaacgattcgaaaagtaaaataaaaactgtgccactgct

SEQ ID NO: 1614 - DNA, 60 bp, Homo sapiens
ctccgggaatccagcctcagtaaaatattcgattttttaacagctaaaaagaatttttct

SEQ ID NO: 1615 - DNA, 60 bp, Homo sapiens
ggagacagggttacatcagccagtaacatcgatgttctcagagcaaaaggaaagtcgtca

SEQ ID NO: 1616 - DNA, 60 bp, Homo sapiens
accacaccctggtcctggtagttaaagatcgaccctccaaggagttcactgttatttgga

SEQ ID NO: 1617 - DNA, 60 bp, Homo sapiens
gaccataatacccaaatatccactacaatcgagagtgacagggagaatcaaagggacagt

SEQ ID NO: 1618 - DNA, 60 bp, Homo sapiens
gagaaggggaaacacaatgtgtctgttatcgagctctgaatttctttttcctactagttt

SEQ ID NO: 1619 - DNA, 60 bp, Homo sapiens
agggcttaccatggttcccaggctggtctcgaactccaaacctcagatgaaccacccacc

SEQ ID NO: 1620 - DNA, 60 bp, Homo sapiens
tctgatttccgagttttcccttcatctctcgaaaaataccaaatatatggaaatcaaaca

SEQ ID NO: 1621 - DNA, 60 bp, Homo sapiens
aaactagagggatctaccagaggaggtgtcgatttgtatatatctaaattggaaaaatgt

SEQ ID NO: 1622 - DNA, 60 bp, Homo sapiens
tgaccccaagcattctggcctgaacgattcgatgatgcagttgcttttgaaactctttaa

SEQ ID NO: 1623 - DNA, 60 bp, Homo sapiens
cctgaaggagctgaatgagcaattccaatcgaccacctgatctccccctttcaacccatc

SEQ ID NO: 1624 - DNA, 60 bp, Homo sapiens
gccgtctggatctccctggaggtgatggtcgagattaggaaatatccaaaacccagaaat

SEQ ID NO: 1625 - DNA, 60 bp, Homo sapiens
gttggaaggaatccagggtaagggatattcgaatttccaagtgagttattacagctgtcc

SEQ ID NO: 1626 - DNA, 60 bp, Homo sapiens
caatttagggcttcagcttccttttccttcgaacctctcagcttgctccttcctattctg

SEQ ID NO: 1627 - DNA, 60 bp, Homo sapiens
ttaccaagcccgatgttctccacgtgactcgaggacaggaactaaattatatgcagtatt

SEQ ID NO: 1628 - DNA, 60 bp, Homo sapiens
tgaccccaagcattctggcctgaacgattcgaaatcaggacatacagattgatacaatac

SEQ ID NO: 1629 - DNA, 60 bp, Homo sapiens
gacacacaggaagtagccatgagaaatatcgagaaatttgtcttttttttttttgacagg

SEQ ID NO: 1630 - DNA, 60 bp, Homo sapiens
agcctaaaacgcagggaaggttcttttatcgaaaggttgatatataactagaaagaagga

SEQ ID NO: 1631 - DNA, 60 bp, Homo sapiens
gactctgatgctggatgaactcccaccctcgattttatctaaatctgcttggctgtgatg

SEQ ID NO: 1632 - DNA, 60 bp, Homo sapiens
acgctgaggaggaagattcgggctggattcgatgtatctcctgtacctagcacggggcta

SEQ ID NO: 1633 - DNA, 60 bp, Homo sapiens
gtcccaagtggcatgagaggtagactcatcgacatcaccaggggcacatggacaccctag

SEQ ID NO: 1634 - DNA, 23 bp, Homo sapiens
cctttaccctaatattttgtgcc

SEQ ID NO: 1635 - DNA, 24 bp, Homo sapiens
gaatcataagcaaaagcactggtg

SEQ ID NO: 1636 - DNA, 23 bp, Homo sapiens
cgtcacagctctattcgacggtg

SEQ ID NO: 1637 - DNA, 24 bp, Homo sapiens
ggtggcgatccctaagaaggtgtg

SEQ ID NO: 1638 - DNA, 23 bp, Homo sapiens
atgtccacacccactgccacgat

SEQ ID NO: 1639 - DNA, 23 bp, Homo sapiens
tgggagggctgagaggtgaggaa

SEQ ID NO: 1640 - DNA, 26 bp, Homo sapiens
ttcttcgcttgacggagccagcagtt

SEQ ID NO: 1641 - DNA, 26 bp, Homo sapiens
ctatcctggtcaaactgggacataca

SEQ ID NO: 1642 - DNA, 24 bp, Homo sapiens
ccaggtgaggttggcagcaagcat

SEQ ID NO: 1643 - DNA, 26 bp, Homo sapiens
gggaatagtttaggctttgggaaatc

SEQ ID NO: 1644 - DNA, 23 bp, Homo sapiens
gatgggagacaggcaggtgagag

SEQ ID NO: 1645 - DNA, 23 bp, Homo sapiens
agtgcgtctctgtgtctgggcta

SEQ ID NO: 1646 - DNA, 26 bp, Homo sapiens
tccatctaaacatcaccgtgctccag

SEQ ID NO: 1647 - DNA, 25 bp, Homo sapiens
gggaaccatctttctcttctgtcat

SEQ ID NO: 1648 - DNA, 23 bp, Homo sapiens
ggtggaagcagcaagggaagacc

SEQ ID NO: 1649 - DNA, 23 bp, Homo sapiens
cccagtcagggaatgagagggta

SEQ ID NO: 1650 - DNA, 23 bp, Homo sapiens
cacctcttactcccctctccctt

SEQ ID NO: 1651 - DNA, 23 bp, Homo sapiens
cggcagggaagatgagaccacag

SEQ ID NO: 1652 - DNA, 23 bp, Homo sapiens
ccaggtgaggttggcagcaagca

SEQ ID NO: 1653 - DNA, 23 bp, Homo sapiens
gcacaggaggagtctgaaagcag

SEQ ID NO: 1654 - DNA, 25 bp, Homo sapiens
gaacgcggtagctttcttcagctaa

SEQ ID NO: 1655 - DNA, 23 bp, Homo sapiens
ggcattcgaataatggtattaag

SEQ ID NO: 1656 - DNA, 24 bp, Homo sapiens
aagagtccttgccacctggaagcg

SEQ ID NO: 1657 - DNA, 23 bp, Homo sapiens
accaggtatggccatcggcgcta

SEQ ID NO: 1658 - DNA, 26 bp, Homo sapiens
gcgtggatactttcctcttccgaact

SEQ ID NO: 1659 - DNA, 26 bp, Homo sapiens
gggaatggttggtggaggttacaagt

SEQ ID NO: 1660 - DNA, 26 bp, Homo sapiens
ggaggagtaaggctgaaataacaggg

SEQ ID NO: 1661 - DNA, 26 bp, Homo sapiens
tcccaccaccatcattactgtcctga

SEQ ID NO: 1662 - DNA, 26 bp, Homo sapiens
gtgctgaatgagtgcggagtccagaa

SEQ ID NO: 1663 - DNA, 26 bp, Homo sapiens
ggtaactggcgaagcactcaataaac

SEQ ID NO: 1664 - DNA, 25 bp, Homo sapiens
tattgtccattaggccccacaaggg

SEQ ID NO: 1665 - DNA, 24 bp, Homo sapiens
gttaagtacccagatattcgctgg

SEQ ID NO: 1666 - DNA, 23 bp, Homo sapiens
gggttctgtatgattaccgtcgt

SEQ ID NO: 1667 - DNA, 25 bp, Homo sapiens
ctcggggtctatggatgcccggtag

SEQ ID NO: 1668 - DNA, 23 bp, Homo sapiens
ctgaaacgcagactggtgggtgc

SEQ ID NO: 1669 - DNA, 23 bp, Homo sapiens
cccaggaatgaggaccacagtct

SEQ ID NO: 1670 - DNA, 26 bp, Homo sapiens
gagccatagccatctgctggtttggt

SEQ ID NO: 1671 - DNA, 26 bp, Homo sapiens
gtggtatcctaaaacctgacctcaac

SEQ ID NO: 1672 - DNA, 26 bp, Homo sapiens
gaccaaagcacctctgaaggacaaag

SEQ ID NO: 1673 - DNA, 26 bp, Homo sapiens
gaccaagaatagtccaactccaacag

SEQ ID NO: 1674 - DNA, 23 bp, Homo sapiens
gttcacccctcagacacacaggt

SEQ ID NO: 1675 - DNA, 23 bp, Homo sapiens
tgaagtggcatctctctcccgcc

SEQ ID NO: 1676 - DNA, 23 bp, Homo sapiens
ggtccagagcattttggtggtgc

SEQ ID NO: 1677 - DNA, 23 bp, Homo sapiens
aagggcagaggcaggacttggac

SEQ ID NO: 1678 - DNA, 26 bp, Homo sapiens
accaaagcacctctgaaggacaaaga

SEQ ID NO: 1679 - DNA, 26 bp, Homo sapiens
caaaagtgtcccttccctgctcccta

SEQ ID NO: 1680 - DNA, 23 bp, Homo sapiens
gcctggtgtgaatcctgcctcca

SEQ ID NO: 1681 - DNA, 23 bp, Homo sapiens
tcaccatctcctcaggcacaagg

SEQ ID NO: 1682 - DNA, 24 bp, Homo sapiens
attccccaccagtatgaggcgaat

SEQ ID NO: 1683 - DNA, 23 bp, Homo sapiens
gttgtctggtatattaacgtgcc

SEQ ID NO: 1684 - DNA, 26 bp, Homo sapiens
gtggctcagaactttacctttgcctc

SEQ ID NO: 1685 - DNA, 26 bp, Homo sapiens
catcacctctctggtattcttcctgg

SEQ ID NO: 1686 - DNA, 26 bp, Homo sapiens
gtggctcagaactttacctttgcctc

SEQ ID NO: 1687 - DNA, 26 bp, Homo sapiens
gagcctacaggatttagagtgggttg

SEQ ID NO: 1688 - DNA, 26 bp, Homo sapiens
gcttcagatgaggctccaccttgtta

SEQ ID NO: 1689 - DNA, 26 bp, Homo sapiens
ccatagaatacagcagcacccagcat

SEQ ID NO: 1690 - DNA, 23 bp, Homo sapiens
agtaggactcgggcagggaggat

SEQ ID NO: 1691 - DNA, 23 bp, Homo sapiens
ttcacagaccagcatcgccccat

SEQ ID NO: 1692 - DNA, 26 bp, Homo sapiens
agaggtgctggagtgtggctgtgatt

SEQ ID NO: 1693 - DNA, 23 bp, Homo sapiens
ccccaaccccatacagtgtgata

SEQ ID NO: 1694 - DNA, 23 bp, Homo sapiens
gccagcgagacactcacacaact

SEQ ID NO: 1695 - DNA, 23 bp, Homo sapiens
gggtgcctccaaatcgcatctcc

SEQ ID NO: 1696 - DNA, 23 bp, Homo sapiens
gcactaagtcctgctaacatcag

SEQ ID NO: 1697 - DNA, 26 bp, Homo sapiens
atgtctgacttagttctccagccagc

SEQ ID NO: 1698 - DNA, 23 bp, Homo sapiens
gccagcgagacactcacacaact

SEQ ID NO: 1699 - DNA, 23 bp, Homo sapiens
cctccctgcttcggcttttccca

SEQ ID NO: 1700 - DNA, 23 bp, Homo sapiens
ggaactaaagggaagcgtccacg

SEQ ID NO: 1701 - DNA, 23 bp, Homo sapiens
acctgccacacctgagacccaga

SEQ ID NO: 1702 - DNA, 25 bp, Homo sapiens
gcgtataaaattagtaacggctaga

SEQ ID NO: 1703 - DNA, 24 bp, Homo sapiens
ggaccgggagtccgatagacctac

SEQ ID NO: 1704 - DNA, 23 bp, Homo sapiens
ccagcacacggcactttcttggg

SEQ ID NO: 1705 - DNA, 23 bp, Homo sapiens
tcaccatctcctcaggcacaagg

SEQ ID NO: 1706 - DNA, 23 bp, Homo sapiens
cagttcgtgttctgacggcaggc

SEQ ID NO: 1707 - DNA, 23 bp, Homo sapiens
ggaggcagtcattctggtgttcc

SEQ ID NO: 1708 - DNA, 26 bp, Homo sapiens
ttcttcgcttgacggagccagcagtt

SEQ ID NO: 1709 - DNA, 26 bp, Homo sapiens
gcgaacaggactggagaaaagtatca

SEQ ID NO: 1710 - DNA, 23 bp, Homo sapiens
ccttgtgggacccctatcttctc

SEQ ID NO: 1711 - DNA, 23 bp, Homo sapiens
tgaagtggcatctctctcccgcc

SEQ ID NO: 1712 - DNA, 26 bp, Homo sapiens
gtcactactgaggactgaaaatgcgg

SEQ ID NO: 1713 - DNA, 26 bp, Homo sapiens
ctgtttgttgaatggactctggaccc

SEQ ID NO: 1714 - DNA, 23 bp, Homo sapiens
cagcccacacacgagatacacac

SEQ ID NO: 1715 - DNA, 23 bp, Homo sapiens
ccagggctgactgacaccaaagc

SEQ ID NO: 1716 - DNA, 23 bp, Homo sapiens
tcccaaggaactatggaggcagg

SEQ ID NO: 1717 - DNA, 23 bp, Homo sapiens
tgaggaaggaggtgccaaccgca

SEQ ID NO: 1718 - DNA, 24 bp, Homo sapiens
tatgagccgggttcatctttgcgc

SEQ ID NO: 1719 - DNA, 24 bp, Homo sapiens
ccacttcggagaaatgaggcgcaa

SEQ ID NO: 1720 - DNA, 25 bp, Homo sapiens
ataaatgtgtcccaggataggaggc

SEQ ID NO: 1721 - DNA, 26 bp, Homo sapiens
gcttgggtccctgaacactgtcattc

SEQ ID NO: 1722 - DNA, 23 bp, Homo sapiens
cacctggaaagaggaagtagggc

SEQ ID NO: 1723 - DNA, 23 bp, Homo sapiens
ggcaggctcaaagcaggcattgg

SEQ ID NO: 1724 - DNA, 23 bp, Homo sapiens
gaggagaatggacaggctgggtc

SEQ ID NO: 1725 - DNA, 23 bp, Homo sapiens
ccccttgtccagagtttccacac

SEQ ID NO: 1726 - DNA, 24 bp, Homo sapiens
acggagcgtatgtgaaaagaagta

SEQ ID NO: 1727 - DNA, 23 bp, Homo sapiens
aagcggtacaaaattgtaccgta

SEQ ID NO: 1728 - DNA, 25 bp, Homo sapiens
ataaatgtgtcccaggataggaggc

SEQ ID NO: 1729 - DNA, 26 bp, Homo sapiens
aggtgttgttgagggtgggtaggaga

SEQ ID NO: 1730 - DNA, 25 bp, Homo sapiens
gttatagtaccgtcgttttaggtgc

SEQ ID NO: 1731 - DNA, 25 bp, Homo sapiens
cattagtaacattttggcacggtgt

SEQ ID NO: 1732 - DNA, 23 bp, Homo sapiens
acttctatgttacaccctcggtc

SEQ ID NO: 1733 - DNA, 24 bp, Homo sapiens
tattatgggtgtgtatatcgccgt

SEQ ID NO: 1734 - DNA, 26 bp, Homo sapiens
cagtctgggcaacatagcaggagtgt

SEQ ID NO: 1735 - DNA, 26 bp, Homo sapiens
ttagattaccacaacatcagcctggg

SEQ ID NO: 1736 - DNA, 23 bp, Homo sapiens
caggtgaggttggcagcaagcat

SEQ ID NO: 1737 - DNA, 23 bp, Homo sapiens
tgtcctctggctctgtttgggcg

SEQ ID NO: 1738 - DNA, 26 bp, Homo sapiens
ttacggctttggtgctctcggacaca

SEQ ID NO: 1739 - DNA, 26 bp, Homo sapiens
atacttcccttttcccacctctggat

SEQ ID NO: 1740 - DNA, 23 bp, Homo sapiens
aaggcaggagccaacccagcaca

SEQ ID NO: 1741 - DNA, 23 bp, Homo sapiens
ttacaggtttgaggtgcccgtcg

SEQ ID NO: 1742 - DNA, 23 bp, Homo sapiens
acttcccagaggctcctgaaagc

SEQ ID NO: 1743 - DNA, 23 bp, Homo sapiens
ggcgttcttggctgacaccctct

SEQ ID NO: 1744 - DNA, 26 bp, Homo sapiens
ctcgtagtaatggagtttgtaacggc

SEQ ID NO: 1745 - DNA, 26 bp, Homo sapiens
gagatggagcagaacaggaagttggg

SEQ ID NO: 1746 - DNA, 23 bp, Homo sapiens
tctcctgctccccactccacagt

SEQ ID NO: 1747 - DNA, 23 bp, Homo sapiens
tgcgagggcaaacacagagtgag

SEQ ID NO: 1748 - DNA, 26 bp, Homo sapiens
ggtggaagcagcaagggaagaccaat

SEQ ID NO: 1749 - DNA, 26 bp, Homo sapiens
gcctctccctcattcaaaagaaagaa

SEQ ID NO: 1750 - DNA, 23 bp, Homo sapiens
aagccgtgggactcgcaggtgaa

SEQ ID NO: 1751 - DNA, 23 bp, Homo sapiens
ctggtcgtcacctcttccaacct

SEQ ID NO: 1752 - DNA, 23 bp, Homo sapiens
cacctctcctccgtcccaccatt

SEQ ID NO: 1753 - DNA, 23 bp, Homo sapiens
cactttgggagactgagagcgga

SEQ ID NO: 1754 - DNA, 26 bp, Homo sapiens
ctgagactgtgaccctgaagaatgac

SEQ ID NO: 1755 - DNA, 26 bp, Homo sapiens
attgttctgagcactgaggacacagc

SEQ ID NO: 1756 - DNA, 26 bp, Homo sapiens
gctcgtaactcaggttgtgaatcttc

SEQ ID NO: 1757 - DNA, 25 bp, Homo sapiens
agatgagcggcaggtttggctgaga

SEQ ID NO: 1758 - DNA, 23 bp, Homo sapiens
agcaaggtgaggtgacagggagc

SEQ ID NO: 1759 - DNA, 23 bp, Homo sapiens
cacacagagtaggcaggcggata

SEQ ID NO: 1760 - DNA, 23 bp, Homo sapiens
gacgcagtctcacacactttggg

SEQ ID NO: 1761 - DNA, 25 bp, Homo sapiens
cccagtcagggaatgagagggtatg

SEQ ID NO: 1762 - DNA, 25 bp, Homo sapiens
gaatccatacccactatccccaacc

SEQ ID NO: 1763 - DNA, 26 bp, Homo sapiens
gggtaagaaaagtgtgtctcattgat

SEQ ID NO: 1764 - DNA, 23 bp, Homo sapiens
gggtgttgcgagatgagcctgat

SEQ ID NO: 1765 - DNA, 23 bp, Homo sapiens
tgaagtggcatctctctcccgcc

SEQ ID NO: 1766 - DNA, 26 bp, Homo sapiens
aggcgacagggttcgggctttattct

SEQ ID NO: 1767 - DNA, 26 bp, Homo sapiens
gaagaggactgtagaaggagacaaga

SEQ ID NO: 1768 - DNA, 23 bp, Homo sapiens
tggcagagggagagggtcagaga

SEQ ID NO: 1769 - DNA, 23 bp, Homo sapiens
caaggagatgcccaggctaatgg

SEQ ID NO: 1770 - DNA, 25 bp, Homo sapiens
gtgttaatcgtccggggaccaattt

SEQ ID NO: 1771 - DNA, 24 bp, Homo sapiens
tcttcgttaagaaatatttccgtt

SEQ ID NO: 1772 - DNA, 23 bp, Homo sapiens
gagttactcgttacggtgcttcg

SEQ ID NO: 1773 - DNA, 25 bp, Homo sapiens
tccacgaccgccacaggaaaggtac

SEQ ID NO: 1774 - DNA, 26 bp, Homo sapiens
ggacgctgaatgttgtcaagtgtttt

SEQ ID NO: 1775 - DNA, 26 bp, Homo sapiens
ggttttcccctggagttggactgttc

SEQ ID NO: 1776 - DNA, 23 bp, Homo sapiens
gtgggcgtctcgtagtaatggag

SEQ ID NO: 1777 - DNA, 23 bp, Homo sapiens
gctgaccttgggtgtggtgtcca

SEQ ID NO: 1778 - DNA, 23 bp, Homo sapiens
gggagtggaggagtaaggctgaa

SEQ ID NO: 1779 - DNA, 23 bp, Homo sapiens
ctgccactttgagactgcccctc

SEQ ID NO: 1780 - DNA, 23 bp, Homo sapiens
taccgtgctgtgtgacctcagac

SEQ ID NO: 1781 - DNA, 23 bp, Homo sapiens
ccgtcttcagccctcagtgtagg

SEQ ID NO: 1782 - DNA, 26 bp, Homo sapiens
tcccatttccccattctggtcctaag

SEQ ID NO: 1783 - DNA, 26 bp, Homo sapiens
gagagattctgttattagtgctttgc

SEQ ID NO: 1784 - DNA, 26 bp, Homo sapiens
ggaggtgacaacagtatcataaagtg

SEQ ID NO: 1785 - DNA, 26 bp, Homo sapiens
aaaccctacaagtgtgaccgctgcca

SEQ ID NO: 1786 - DNA, 23 bp, Homo sapiens
gcgagaacggaggctaagttgat

SEQ ID NO: 1787 - DNA, 24 bp, Homo sapiens
ccccacgccaccatagatgtgcgc

SEQ ID NO: 1788 - DNA, 25 bp, Homo sapiens
ctgaatccctaggtcatgggtgtgg

SEQ ID NO: 1789 - DNA, 24 bp, Homo sapiens
tccctaaccgtaaaaacatgcagg

SEQ ID NO: 1790 - DNA, 25 bp, Homo sapiens
tgtatactcaaagccatcataagtg

SEQ ID NO: 1791 - DNA, 24 bp, Homo sapiens
catagtgctagtccattccataac

SEQ ID NO: 1792 - DNA, 24 bp, Homo sapiens
gtatatacgataagtgatcaattg

SEQ ID NO: 1793 - DNA, 23 bp, Homo sapiens
agccacacctgcgcccggaaccc

SEQ ID NO: 1794 - DNA, 24 bp, Homo sapiens
aaatcccccagggctagctcgctt

SEQ ID NO: 1795 - DNA, 25 bp, Homo sapiens
ttgtggtcgacacacatgataagtt

SEQ ID NO: 1796 - DNA, 23 bp, Homo sapiens
gctttggtgctctcggacacagc

SEQ ID NO: 1797 - DNA, 23 bp, Homo sapiens
gcggtggtttatgcgtccttagc

SEQ ID NO: 1798 - DNA, 24 bp, Homo sapiens
cccctagccgtttaatagtataca

SEQ ID NO: 1799 - DNA, 25 bp, Homo sapiens
tttttcggcctagataagattccac

SEQ ID NO: 1800 - DNA, 25 bp, Homo sapiens
ataaatgtgtcccaggataggaggc

SEQ ID NO: 1801 - DNA, 26 bp, Homo sapiens
tgagggcactgctcttggattcacca

SEQ ID NO: 1802 - DNA, 23 bp, Homo sapiens
tcccatttaggagagtgcctggc

SEQ ID NO: 1803 - DNA, 23 bp, Homo sapiens
gtgctctttcactctcctccgcc

SEQ ID NO: 1804 - DNA, 26 bp, Homo sapiens
ggtaactggcgaagcactcaataaac

SEQ ID NO: 1805 - DNA, 26 bp, Homo sapiens
acccagccatctgcctctcagtgaat

SEQ ID NO: 1806 - DNA, 23 bp, Homo sapiens
ccacacacgagatacacacaccc

SEQ ID NO: 1807 - DNA, 23 bp, Homo sapiens
ttgctggcagagactcgcctgga

SEQ ID NO: 1808 - DNA, 23 bp, Homo sapiens
actcccgccttcgtgcccaaata

SEQ ID NO: 1809 - DNA, 23 bp, Homo sapiens
cagccctactcaccctccttgtc

SEQ ID NO: 1810 - DNA, 24 bp, Homo sapiens
tgaacccactgctaataccaaccg

SEQ ID NO: 1811 - DNA, 24 bp, Homo sapiens
cagtgcgggggtgggtcggccgat

SEQ ID NO: 1812 - DNA, 23 bp, Homo sapiens
tcagtctccatacaccttggagt

SEQ ID NO: 1813 - DNA, 25 bp, Homo sapiens
cctttgtctaggagctgttgacatg

SEQ ID NO: 1814 - DNA, 26 bp, Homo sapiens
acgagcaaaggtgagaaagcaaatgc

SEQ ID NO: 1815 - DNA, 25 bp, Homo sapiens
cccctcagaactcaggagaaatcat

SEQ ID NO: 1816 - DNA, 25 bp, Homo sapiens
gcatgactggcaacggctcgccctg

SEQ ID NO: 1817 - DNA, 25 bp, Homo sapiens
gtagtagacgatgtgcgcagtcgga

SEQ ID NO: 1818 - DNA, 24 bp, Homo sapiens
aagtaaatcctcggagctgagacg

SEQ ID NO: 1819 - DNA, 25 bp, Homo sapiens
ataagcagcctcaactgccttccga

SEQ ID NO: 1820 - DNA, 23 bp, Homo sapiens
gttcccgccttcctccatcttgc

SEQ ID NO: 1821 - DNA, 23 bp, Homo sapiens
aggctccaggctctgagatttgg

SEQ ID NO: 1822 - DNA, 23 bp, Homo sapiens
ttggaggtggaggtctgccaggt

SEQ ID NO: 1823 - DNA, 23 bp, Homo sapiens
tccctaccctcctatgtgctcct

SEQ ID NO: 1824 - DNA, 23 bp, Homo sapiens
tcagcagggcaggaacacagtgg

SEQ ID NO: 1825 - DNA, 23 bp, Homo sapiens
ctgccctggaagcctatgtgact

SEQ ID NO: 1826 - DNA, 26 bp, Homo sapiens
cacctgttgtaatcctggcactctgg

SEQ ID NO: 1827 - DNA, 26 bp, Homo sapiens
gatacacagaccttgaggcaacaatg

SEQ ID NO: 1828 - DNA, 23 bp, Homo sapiens
ccaggtgaggttggcagcaagca

SEQ ID NO: 1829 - DNA, 23 bp, Homo sapiens
ggagtgggaaaggaagcgacaga

SEQ ID NO: 1830 - DNA, 25 bp, Homo sapiens
aaacgttacccaggccactactcat

SEQ ID NO: 1831 - DNA, 25 bp, Homo sapiens
caaaattccggctctcgcatgggtt

SEQ ID NO: 1832 - DNA, 23 bp, Homo sapiens
acttagtttctcacgttgtcaca

SEQ ID NO: 1833 - DNA, 25 bp, Homo sapiens
tttacagtggacgcttccggaaaac

SEQ ID NO: 1834 - DNA, 23 bp, Homo sapiens
gggagtggaggagtaaggctgaa

SEQ ID NO: 1835 - DNA, 23 bp, Homo sapiens
cctccatttccccaaccgcctga

SEQ ID NO: 1836 - DNA, 24 bp, Homo sapiens
tgtagtcttagaacccccgtacgt

SEQ ID NO: 1837 - DNA, 25 bp, Homo sapiens
gagtacccctaatgccgggtacagt

SEQ ID NO: 1838 - DNA, 23 bp, Homo sapiens
ggtcacagaaggaagcctactgc

SEQ ID NO: 1839 - DNA, 23 bp, Homo sapiens
cgcagtccgatgctctatctccc

SEQ ID NO: 1840 - DNA, 24 bp, Homo sapiens
aatatccatcccccggaacttgct

SEQ ID NO: 1841 - DNA, 24 bp, Homo sapiens
gaaagttgagttccaggaccttga

SEQ ID NO: 1842 - DNA, 23 bp, Homo sapiens
agttttgttgtttcttttcttca

SEQ ID NO: 1843 - DNA, 24 bp, Homo sapiens
gcactctgttgggattgccaggga

SEQ ID NO: 1844 - DNA, 25 bp, Homo sapiens
gtccgtgcccagtgctttggcgtcg

SEQ ID NO: 1845 - DNA, 23 bp, Homo sapiens
cctttaagggcccaagctgggtc

SEQ ID NO: 1846 - DNA, 23 bp, Homo sapiens
gcagacaggcagaaggacagaac

SEQ ID NO: 1847 - DNA, 23 bp, Homo sapiens
gctggtgcttgggaaggtaggag

SEQ ID NO: 1848 - DNA, 26 bp, Homo sapiens
ggtggaagcagcaagggaagaccaat

SEQ ID NO: 1849 - DNA, 26 bp, Homo sapiens
ctctgataacatcttccctctacacg

SEQ ID NO: 1850 - DNA, 23 bp, Homo sapiens
aatccttcctgcccctgtgccag

SEQ ID NO: 1851 - DNA, 23 bp, Homo sapiens
atgtgggaagcctggcactgatg

SEQ ID NO: 1852 - DNA, 23 bp, Homo sapiens
gctttggtgctctcggacacagc

SEQ ID NO: 1853 - DNA, 23 bp, Homo sapiens
gcctgaacgagggacctatcaac

SEQ ID NO: 1854 - DNA, 26 bp, Homo sapiens
gaccaaagcacctctgaaggacaaag

SEQ ID NO: 1855 - DNA, 26 bp, Homo sapiens
gccttttgtgccatccctttcctaag

SEQ ID NO: 1856 - DNA, 25 bp, Homo sapiens
ttaccgactcatgacggcgattctc

SEQ ID NO: 1857 - DNA, 25 bp, Homo sapiens
aggaacctatacctatgctgctctg

SEQ ID NO: 1858 - DNA, 26 bp, Homo sapiens
cttatcgtccgccttcattcctatgc

SEQ ID NO: 1859 - DNA, 26 bp, Homo sapiens
cccagacatcctaccaccagtaaaac

SEQ ID NO: 1860 - DNA, 26 bp, Homo sapiens
ggtggaagcagcaagggaagaccaat

SEQ ID NO: 1861 - DNA, 26 bp, Homo sapiens
gcataatcttggactttcgtttgcca

SEQ ID NO: 1862 - DNA, 25 bp, Homo sapiens
gattagcgctggaccttgttgtcca

SEQ ID NO: 1863 - DNA, 25 bp, Homo sapiens
cttccatgctgggtaccaatatgaa

SEQ ID NO: 1864 - DNA, 26 bp, Homo sapiens
ctaaacaggttcagacatagccccta

SEQ ID NO: 1865 - DNA, 26 bp, Homo sapiens
tggacagggcaggcaataacagggat

SEQ ID NO: 1866 - DNA, 25 bp, Homo sapiens
ctatattgtgtgatgtcagcatgtc

SEQ ID NO: 1867 - DNA, 23 bp, Homo sapiens
gtggtcccgccgtttgcaagtgt

SEQ ID NO: 1868 - DNA, 25 bp, Homo sapiens
tctcacaaggggtagggtcactcca

SEQ ID NO: 1869 - DNA, 23 bp, Homo sapiens
gcatcatcgagccccctattcac

SEQ ID NO: 1870 - DNA, 23 bp, Homo sapiens
gatgggagacaggcaggtgagag

SEQ ID NO: 1871 - DNA, 23 bp, Homo sapiens
ggctccccaggtctttactaacc

SEQ ID NO: 1872 - DNA, 28 bp, Homo sapiens
cggagagagggacgcaggaatggaaggg

SEQ ID NO: 1873 - DNA, 27 bp, Homo sapiens
cgaacccaccacacacacacaccagac

SEQ ID NO: 1874 - DNA, 28 bp, Homo sapiens
gaagcccagggaggtgtgtgaggactgc

SEQ ID NO: 1875 - DNA, 23 bp, Homo sapiens
ctcctcctgccagcctcctgagc

SEQ ID NO: 1876 - DNA, 23 bp, Homo sapiens
caggtcccctcccagacaccagc

SEQ ID NO: 1877 - DNA, 28 bp, Homo sapiens
agaggaggcgagacgaagaggtgggagc

SEQ ID NO: 1878 - DNA, 27 bp, Homo sapiens
gcacagcaaggtgaggtgacagggagc

SEQ ID NO: 1879 - DNA, 28 bp, Homo sapiens
ttaggcttccttgcgggtgctcctcagg

SEQ ID NO: 1880 - DNA, 28 bp, Homo sapiens
ggactggacacttgagagggcactgggc

SEQ ID NO: 1881 - DNA, 23 bp, Homo sapiens
aaggcagcagccagagccccagc

SEQ ID NO: 1882 - DNA, 28 bp, Homo sapiens
ggactggacacttgagagggcactgggc

SEQ ID NO: 1883 - DNA, 23 bp, Homo sapiens
cacaggtgcccagcccagtggac

SEQ ID NO: 1884 - DNA, 28 bp, Homo sapiens
ctctgaaggtccagtcacagggaacttg

SEQ ID NO: 1885 - DNA, 28 bp, Homo sapiens
tcaaggctgctcatacaacatccattct

SEQ ID NO: 1886 - DNA, 28 bp, Homo sapiens
gtggtgggcagtggcggcaacgacaaag

SEQ ID NO: 1887 - DNA, 26 bp, Homo sapiens
ggagcctggaaaacagaggatgcccc

SEQ ID NO: 1888 - DNA, 28 bp, Homo sapiens
ggtggacctgacacggatgcctgctgac

SEQ ID NO: 1889 - DNA, 24 bp, Homo sapiens
cctcgtgaatccgcctgccttggc

SEQ ID NO: 1890 - DNA, 25 bp, Homo sapiens
cctctttggtgtgggctccgacctc

SEQ ID NO: 1891 - DNA, 28 bp, Homo sapiens
ccctgggcactactgactcctgggctgt

SEQ ID NO: 1892 - DNA, 28 bp, Homo sapiens
ggctcactgacctcccaggctcaagcga

SEQ ID NO: 1893 - DNA, 28 bp, Homo sapiens
ctcagggatgcggttgaatagtccgtcc

SEQ ID NO: 1894 - DNA, 28 bp, Homo sapiens
caggaagcaggcaacagcccgatgacac

SEQ ID NO: 1895 - DNA, 27 bp, Homo sapiens
gtgagtgttcagcaggaagcggcagcg

SEQ ID NO: 1896 - DNA, 34 bp, Homo sapiens
agctgcaggaaaaccccgttcttattcgacatat

SEQ ID NO: 1897 - DNA, 32 bp, Homo sapiens
tgtttcggctttagttcgatggtgaagacccc

SEQ ID NO: 1898 - DNA, 33 bp, Homo sapiens
tccctgtctagtcctatctgttcatcgagccag

SEQ ID NO: 1899 - DNA, 33 bp, Homo sapiens
aggccgttctaaaagcacatttgtatcgaataa

SEQ ID NO: 1900 - DNA, 33 bp, Homo sapiens
tgtgtatcgagcaacccctgagaataaggtggc

SEQ ID NO: 1901 - DNA, 34 bp, Homo sapiens
actgctgttgtgtatcgaggtgtaactcactagc

SEQ ID NO: 1902 - DNA, 34 bp, Homo sapiens
tcctgtctcaagagccgagctcctcgaagccatt

SEQ ID NO: 1903 - DNA, 26 bp, Homo sapiens
ggggcatcctctgttttccaggctcc

SEQ ID NO: 1904 - DNA, 32 bp, Homo sapiens
aggagttcgagacaagcctggccaacatggtg

SEQ ID NO: 1905 - DNA, 34 bp, Homo sapiens
tgtcagcacttggagctatccaatggtcgaagcg

SEQ ID NO: 1906 - DNA, 32 bp, Homo sapiens
tcaccatattgccagggctggtctcgaactcc

SEQ ID NO: 1907 - DNA, 34 bp, Homo sapiens
aggactcatgttctctcgaggtctagaatctgag

SEQ ID NO: 1908 - DNA, 34 bp, Homo sapiens
agagaactgaaagcatatgtcgaataagaacggg

SEQ ID NO: 1909 - DNA, 34 bp, Homo sapiens
accatcgaactaaagccgaaacacattgagctct

SEQ ID NO: 1910 - DNA, 33 bp, Homo sapiens
tctggctcgatgaacagataggactagacaggg

SEQ ID NO: 1911 - DNA, 34 bp, Homo sapiens
ttattcgatacaaatgtgcttttagaacggcctc

SEQ ID NO: 1912 - DNA, 32 bp, Homo sapiens
ttgctcgatacacaacagcagttattataccc

SEQ ID NO: 1913 - DNA, 34 bp, Homo sapiens
tgctagtgagttacacctcgatacacaacagcag

SEQ ID NO: 1914 - DNA, 32 bp, Homo sapiens
aatggcttcgaggagctcggctcttgagacag

SEQ ID NO: 1915 - DNA, 30 bp, Homo sapiens
agcctggtctcgaaccccgttgagagagag

SEQ ID NO: 1916 - DNA, 32 bp, Homo sapiens
accatgttggccaggcttgtctcgaactcctg

SEQ ID NO: 1917 - DNA, 34 bp, Homo sapiens
tcgcttcgaccattggatagctccaagtgctgac

SEQ ID NO: 1918 - DNA, 32 bp, Homo sapiens
aggagttcgagaccagccctggcaatatggtg

SEQ ID NO: 1919 - DNA, 32 bp, Homo sapiens
agacctcgagagaacatgagtcctttcccctc

SEQ ID NO: 1920 - DNA, 60 bp, Homo sapiens; identical to SEQ ID NO: 1196

SEQ ID NO: 1921 - DNA, 60 bp, Homo sapiens; identical to SEQ ID NO: 36

SEQ ID NO: 1922 - DNA, 60 bp, Homo sapiens; identical to SEQ ID NO: 1195

SEQ ID NO: 1923 - DNA, 60 bp, Homo sapiens; identical to SEQ ID NO: 47

SEQ ID NO: 1924 - DNA, 60 bp, Homo sapiens; identical to SEQ ID NO: 39

SEQ ID NO: 1925 - DNA, 60 bp, Homo sapiens; identical to SEQ ID NO: 19

SEQ ID NO: 1926 - DNA, 28 bp, Homo sapiens
atttcaggctcgtgttcaagggtccagt

SEQ ID NO: 1927 - DNA, 24 bp, Homo sapiens
cccctccgtgggacaggaacagtt

SEQ ID NO: 1928 - DNA, 24 bp, Homo sapiens
gacctgaggcgtgtccgatgtggg

SEQ ID NO: 1929 - DNA, 28 bp, Homo sapiens
aatcatcatctctggagcctctgaaagc

SEQ ID NO: 1930 - DNA, 28 bp, Homo sapiens
cgcattcttttgccaacaccacatcatc

SEQ ID NO: 1931 - DNA, 28 bp, Homo sapiens
gcagtaatcaagacagtgctatgctggc

SEQ ID NO: 1932 - DNA, 28 bp, Homo sapiens
ggatacaacagccaacttcaaacacatt

SEQ ID NO: 1933 - DNA, 28 bp, Homo sapiens
gagtcacctttcgtcttttccatttccc

SEQ ID NO: 1934 - DNA, 28 bp, Homo sapiens
ccagagacacggagtggagtcagtggcg

SEQ ID NO: 1935 - DNA, 28 bp, Homo sapiens
ctctgctgggtgtcattccttttccctc

SEQ ID NO: 1936 - DNA, 28 bp, Homo sapiens
cactgacccaggaaaaccaccctcattc

SEQ ID NO: 1937 - DNA, 27 bp, Homo sapiens
cctcttgacctccagcgagaccactcc

SEQ ID NO: 1938 - DNA, 34 bp, Homo sapiens
agcgggactgactgattgccagcaattcgaaaat

SEQ ID NO: 1939 - DNA, 34 bp, Homo sapiens; identical to SEQ ID NO: 1097

SEQ ID NO: 1940 - DNA, 32 bp, Homo sapiens
taggaaggagcaagctgagaggttcgacctgg

SEQ ID NO: 1941 - DNA, 35 bp, Homo sapiens; identical to SEQ ID NO: 1102

SEQ ID NO: 1942 - DNA, 34 bp, Homo sapiens
tgggatgacattaaatgtataggtcgaactcctg

SEQ ID NO: 1943 - DNA, 35 bp, Homo sapiens
atagaatcgaactcctgacttcaggaaatctgccc

SEQ ID NO: 1944 - DNA, 33 bp, Homo sapiens
attttcgaattgctggcaatcagtcagtcccgc

SEQ ID NO: 1945 - DNA, 33 bp, Homo sapiens; identical to SEQ ID NO: 1132

SEQ ID NO: 1946 - DNA, 32 bp, Homo sapiens
tccaggtcgaacctctcagcttgctccttcct

SEQ ID NO: 1947 - DNA, 34 bp, Homo sapiens; identical to SEQ ID NO: 1137

SEQ ID NO: 1948 - DNA, 34 bp, Homo sapiens
tcaggagttcgacctatacatttaatgtcatccc

SEQ ID NO: 1949 - DNA, 34 bp, Homo sapiens
tcctgaagtcaggagttcgattctatcccattag

SEQ ID NO: 1950 - DNA, 26 bp, Homo sapiens
cacaaagacccctaactcagtcttgg

SEQ ID NO: 1951 - DNA, 34 bp, Homo sapiens; identical to SEQ ID NO: 1938
  misc_feature (1)..(1): 56-FAM
  misc_feature (9)..(9): ZEN
  misc_feature (34)..(34): 3IABkFQ

SEQ ID NO: 1952 - DNA, 34 bp, Homo sapiens; identical to SEQ ID NO: 1097
  misc_feature (1)..(1): 56-FAM
  misc_feature (9)..(9): zen
  misc_feature (34)..(34): 3IABkFQ

SEQ ID NO: 1953 - DNA, 32 bp, Homo sapiens; identical to SEQ ID NO: 1940
  misc_feature (1)..(1): 56-FAM
  misc_feature (9)..(9): ZEN
  misc_feature (32)..(32): 3IABkFQ

SEQ ID NO: 1954 - DNA, 35 bp, Homo sapiens; identical to SEQ ID NO: 1102
  misc_feature (1)..(1): 56-FAM
  misc_feature (9)..(9): ZEN
  misc_feature (35)..(35): 3IABkFQ

SEQ ID NO: 1955 - DNA, 34 bp, Homo sapiens; identical to SEQ ID NO: 1942
  misc_feature (1)..(1): 56-FAM
  misc_feature (9)..(9): ZEN
  misc_feature (34)..(34): 3IABkFQ

SEQ ID NO: 1956 - DNA, 35 bp, Homo sapiens; identical to SEQ ID NO: 1943
  misc_feature (1)..(1): 56-FAM
  misc_feature (9)..(9): ZEN
  misc_feature (35)..(35): 3IABkFQ

SEQ ID NO: 1957 - DNA, 60 bp, Homo sapiens; identical to SEQ ID NO: 1

SEQ ID NO: 1958 - DNA, 60 bp, Homo sapiens; identical to SEQ ID NO: 2

SEQ ID NO: 1959 - DNA, 60 bp, Homo sapiens; identical to SEQ ID NO: 3

SEQ ID NO: 1960 - DNA, 60 bp, Homo sapiens; identical to SEQ ID NO: 4

SEQ ID NO: 1961 - DNA, 60 bp, Homo sapiens; identical to SEQ ID NO: 5

SEQ ID NO: 1962 - DNA, 60 bp, Homo sapiens; identical to SEQ ID NO: 6

SEQ ID NO: 1963 - DNA, 60 bp, Homo sapiens; identical to SEQ ID NO: 7

SEQ ID NO: 1964 - DNA, 60 bp, Homo sapiens; identical to SEQ ID NO: 8

SEQ ID NO: 1965 - DNA, 60 bp, Homo sapiens; identical to SEQ ID NO: 9

SEQ ID NO: 1966 - DNA, 60 bp, Homo sapiens; identical to SEQ ID NO: 10

SEQ ID NO: 1967 - DNA, 60 bp, Homo sapiens; identical to SEQ ID NO: 11

SEQ ID NO: 1968 - DNA, 60 bp, Homo sapiens; identical to SEQ ID NO: 12

SEQ ID NO: 1969 - DNA, 60 bp, Homo sapiens; identical to SEQ ID NO: 13

SEQ ID NO: 1970 - DNA, 60 bp, Homo sapiens; identical to SEQ ID NO: 14

SEQ ID NO: 1971 - DNA, 60 bp, Homo sapiens; identical to SEQ ID NO: 15

SEQ ID NO: 1972 - DNA, 60 bp, Homo sapiens; identical to SEQ ID NO: 16

SEQ ID NO: 1973 - DNA, 60 bp, Homo sapiens; identical to SEQ ID NO: 17

SEQ ID NO: 1974 - DNA, 60 bp, Homo sapiens; identical to SEQ ID NO: 18

SEQ ID NO: 1975 - DNA, 60 bp, Homo sapiens; identical to SEQ ID NO: 19

SEQ ID NO: 1976 - DNA, 60 bp, Homo sapiens; identical to SEQ ID NO: 20

SEQ ID NO: 1977 - DNA, 60 bp, Homo sapiens; identical to SEQ ID NO: 21

SEQ ID NO: 1978 - DNA, 60 bp, Homo sapiens; identical to SEQ ID NO: 22

SEQ ID NO: 1979 - DNA, 60 bp, Homo sapiens; identical to SEQ ID NO: 23

SEQ ID NO: 1980 - DNA, 60 bp, Homo sapiens; identical to SEQ ID NO: 24

SEQ ID NO: 1981 - DNA, 60 bp, Homo sapiens; identical to SEQ ID NO: 25

SEQ ID NO: 1982 - DNA, 60 bp, Homo sapiens; identical to SEQ ID NO: 26

SEQ ID NO: 1983 - DNA, 60 bp, Homo sapiens; identical to SEQ ID NO: 27

SEQ ID NO: 1984 - DNA, 60 bp, Homo sapiens; identical to SEQ ID NO: 28

SEQ ID NO: 1985 - DNA, 60 bp, Homo sapiens; identical to SEQ ID NO: 29

SEQ ID NO: 1986 - DNA, 60 bp, Homo sapiens; identical to SEQ ID NO: 30

SEQ ID NO: 1987 - DNA, 60 bp, Homo sapiens; identical to SEQ ID NO: 31

SEQ ID NO: 1988 - DNA, 60 bp, Homo sapiens; identical to SEQ ID NO: 32

SEQ ID NO: 1989 - DNA, 60 bp, Homo sapiens; identical to SEQ ID NO: 33

SEQ ID NO: 1990 - DNA, 60 bp, Homo sapiens; identical to SEQ ID NO: 34

SEQ ID NO: 1991 - DNA, 60 bp, Homo sapiens; identical to SEQ ID NO: 35

SEQ ID NO: 1992 - DNA, 60 bp, Homo sapiens; identical to SEQ ID NO: 36

SEQ ID NO: 1993 - DNA, 60 bp, Homo sapiens; identical to SEQ ID NO: 37

SEQ ID NO: 1994 - DNA, 60 bp, Homo sapiens; identical to SEQ ID NO: 38

SEQ ID NO: 1995 - DNA, 60 bp, Homo sapiens; identical to SEQ ID NO: 39

SEQ ID NO: 1996 - DNA, 60 bp, Homo sapiens; identical to SEQ ID NO: 40

SEQ ID NO: 1997 - DNA, 60 bp, Homo sapiens; identical to SEQ ID NO: 41

SEQ ID NO: 1998 - DNA, 60 bp, Homo sapiens; identical to SEQ ID NO: 42

SEQ ID NO: 1999 - DNA, 60 bp, Homo sapiens; identical to SEQ ID NO: 43

SEQ ID NO: 2000 - DNA, 60 bp, Homo sapiens; identical to SEQ ID NO: 44

SEQ ID NO: 2001 - DNA, 60 bp, Homo sapiens; identical to SEQ ID NO: 45

SEQ ID NO: 2002 - DNA, 60 bp, Homo sapiens; identical to SEQ ID NO: 46

SEQ ID NO: 2003 - DNA, 60 bp, Homo sapiens; identical to SEQ ID NO: 47

SEQ ID NO: 2004 - DNA, 60 bp, Homo sapiens; identical to SEQ ID NO: 48

SEQ ID NO: 2005 - DNA, 60 bp, Homo sapiens; identical to SEQ ID NO: 49

SEQ ID NO: 2006 - DNA, 60 bp, Homo sapiens; identical to SEQ ID NO: 50

SEQ ID NO: 2007 - DNA, 23 bp, Homo sapiens
gctgccctgaaaatgggagtctg

SEQ ID NO: 2008 - DNA, 23 bp, Homo sapiens
ctctctcccttcagcacagccac

SEQ ID NO: 2009 - DNA, 26 bp, Homo sapiens
tgccctgaaaatgggagtctgagtta

SEQ ID NO: 2010 - DNA, 26 bp, Homo sapiens
ggatgaatgtgacgctttcgttcccc

SEQ ID NO: 2011 - DNA, 26 bp, Homo sapiens
gaatgcttctggaacacttcttcaag

SEQ ID NO: 2012 - DNA, 26 bp, Homo sapiens
ctgtcccatctgcctaaaaccgttgg

SEQ ID NO: 2013 - DNA, 26 bp, Homo sapiens
gcacacagtaagcacgcaataaaatg

SEQ ID NO: 2014 - DNA, 26 bp, Homo sapiens
ggataagccacaaggcaactggtctg

SEQ ID NO: 2015 - DNA, 26 bp, Homo sapiens
gaaggtggcattctctattgtgtcca

SEQ ID NO: 2016 - DNA, 26 bp, Homo sapiens
actgcggaacttcaaaggtcaggtgc

SEQ ID NO: 2017 - DNA, 23 bp, Homo sapiens
gggtgaccgagtgagatgatgtc

SEQ ID NO: 2018 - DNA, 26 bp, Homo sapiens
accctgtagtcctgggctcaagagat

SEQ ID NO: 2019 - DNA, 23 bp, Homo sapiens
gaggaaccaccaggctttggagc

SEQ ID NO: 2020 - DNA, 26 bp, Homo sapiens
ggttgggttttctcaataatccatag

SEQ ID NO: 2021 - DNA, 23 bp, Homo sapiens
agggtgagggtatgtgggtagtg

SEQ ID NO: 2022 - DNA, 23 bp, Homo sapiens
cagccagcagagacaggaagtgc

SEQ ID NO: 2023 - DNA, 26 bp, Homo sapiens
gagagttattcctcaagtgctcccac

SEQ ID NO: 2024 - DNA, 26 bp, Homo sapiens
cagaacacagtgaacaaccaggcatt

SEQ ID NO: 2025 - DNA, 24 bp, Homo sapiens
attctaagttttctctcccacccc

SEQ ID NO: 2026 - DNA, 26 bp, Homo sapiens
gaacagggatgggcagaagcagaaaa

SEQ ID NO: 2027 - DNA, 26 bp, Homo sapiens
cagggctacagatgctggcaaagttg

SEQ ID NO: 2028 - DNA, 26 bp, Homo sapiens
cacaaggcaactggtctgaatgtttc

SEQ ID NO: 2029 - DNA, 26 bp, Homo sapiens
ctctggcattggtcaaggtcaaagta

SEQ ID NO: 2030 - DNA, 26 bp, Homo sapiens
atagggctggagaggagtaggcagat

SEQ ID NO: 2031 - DNA, 25 bp, Homo sapiens
agagcgcacggagatcaccgagcga

SEQ ID NO: 2032 - DNA, 24 bp, Homo sapiens
gaggtactggagccgagaggtaac

SEQ ID NO: 2033 - DNA, 24 bp, Homo sapiens
tctatcagatcggcgaccatttgt

SEQ ID NO: 2034 - DNA, 23 bp, Homo sapiens
tacgatgccgctaagaacctctc

SEQ ID NO: 2035 - DNA, 26 bp, Homo sapiens
gaaggaaggtgacttgcttgcccaac

SEQ ID NO: 2036 - DNA, 26 bp, Homo sapiens
atgaaatcacacccaagtccctcact

SEQ ID NO: 2037 - DNA, 23 bp, Homo sapiens
ggtcgtcgctgacgtttacactc

SEQ ID NO: 2038 - DNA, 24 bp, Homo sapiens
tagtctcattataatcgttcgcta

SEQ ID NO: 2039 - DNA, 26 bp, Homo sapiens
gggaggaagactgtagttggagacat

SEQ ID NO: 2040 - DNA, 26 bp, Homo sapiens
tggagggcttgctatggtctgaatgt

SEQ ID NO: 2041 - DNA, 23 bp, Homo sapiens
aggagcctctggagcaaggtcag

SEQ ID NO: 2042 - DNA, 23 bp, Homo sapiens
gccatcccctacacaggttctca

SEQ ID NO: 2043 - DNA, 26 bp, Homo sapiens
gtaatcaagacagtgctatgctggca

SEQ ID NO: 2044 - DNA, 23 bp, Homo sapiens
cctgacccaccaagactgaacca

SEQ ID NO: 2045 - DNA, 24 bp, Homo sapiens
ttcagggattgaccaacaccggaa

SEQ ID NO: 2046 - DNA, 24 bp, Homo sapiens
aacatctcacttgaagtaatgtat

SEQ ID NO: 2047 - DNA, 26 bp, Homo sapiens
ctttactcttatgctctgctctgtgc

SEQ ID NO: 2048 - DNA, 26 bp, Homo sapiens
aaacacagatgagttcgggcgtggtg

SEQ ID NO: 2049 - DNA, 23 bp, Homo sapiens
taggctgtcctcctcctgtgcca

SEQ ID NO: 2050 - DNA, 23 bp, Homo sapiens
tggagaccccaggctaatacagc

SEQ ID NO: 2051 - DNA, 23 bp, Homo sapiens
gatgggctgaggtggagtctacc

SEQ ID NO: 2052 - DNA, 23 bp, Homo sapiens
ccgcccatctgtaagcccatctc

SEQ ID NO: 2053 - DNA, 26 bp, Homo sapiens
ttacctcagacatagaaagtgactgc

SEQ ID NO: 2054 - DNA, 26 bp, Homo sapiens
gccacaaggcaactggtctgaatgtt

SEQ ID NO: 2055 - DNA, 26 bp, Homo sapiens
tctgtcttgctcgtgatagtagttgg

SEQ ID NO: 2056 - DNA, 26 bp, Homo sapiens
gtaggcgttcatcttcacggtaaggc

SEQ ID NO: 2057 - DNA, 26 bp, Homo sapiens
cctcaaatcttgtcgggagttcctca

SEQ ID NO: 2058 - DNA, 26 bp, Homo sapiens
actgtgaccaaaggaaggaaagccat

SEQ ID NO: 2059 - DNA, 26 bp, Homo sapiens
gcaaccccactgaatgaaacggacac

SEQ ID NO: 2060 - DNA, 26 bp, Homo sapiens
cacaaggcaactggtctgaatgtttc

SEQ ID NO: 2061 - DNA, 24 bp, Homo sapiens
ggtcccagagatgttgacagcctg

SEQ ID NO: 2062 - DNA, 23 bp, Homo sapiens
gccatcccctacacaggttctca

SEQ ID NO: 2063 - DNA, 26 bp, Homo sapiens
gagttctacctaagtcagaggaggaa

SEQ ID NO: 2064 - DNA, 26 bp, Homo sapiens
atagggctggagaggagtaggcagat

SEQ ID NO: 2065 - DNA, 23 bp, Homo sapiens
ggctcttgctctgctatgggttg

SEQ ID NO: 2066 - DNA, 23 bp, Homo sapiens
ggcgatgcccagcaagagtgaag

SEQ ID NO: 2067 - DNA, 26 bp, Homo sapiens
tgttccattgtagacttctcggaggc

SEQ ID NO: 2068 - DNA, 26 bp, Homo sapiens
tggagggcttgctatggtctgaatgt

SEQ ID NO: 2069 - DNA, 23 bp, Homo sapiens
cccctccctcattcctaccatca

SEQ ID NO: 2070 - DNA, 23 bp, Homo sapiens
ggcgatgcccagcaagagtgaag

SEQ ID NO: 2071 - DNA, 23 bp, Homo sapiens
gtgccaccctgggctggatgatt

SEQ ID NO: 2072 - DNA, 23 bp, Homo sapiens
gcctctggtgcccttttgggttg

SEQ ID NO: 2073 - DNA, 24 bp, Homo sapiens
acgacagagtccgtgcacctacca

SEQ ID NO: 2074 - DNA, 25 bp, Homo sapiens
ctgacgctgcaaaatttgcaaccag

SEQ ID NO: 2075 - DNA, 25 bp, Homo sapiens
aacctctttagtctaagttcagact

SEQ ID NO: 2076 - DNA, 25 bp, Homo sapiens
gcagtcttcgcggtaggtcctagtg

SEQ ID NO: 2077 - DNA, 25 bp, Homo sapiens
agttggaagtttgtctagatctcag

SEQ ID NO: 2078 - DNA, 24 bp, Homo sapiens
agatatctttgatgtcgtgattgg

SEQ ID NO: 2079 - DNA, 25 bp, Homo sapiens
attttgtcactagaggacgcacgct

SEQ ID NO: 2080 - DNA, 24 bp, Homo sapiens
ctcgagaggaggagacgtcagtcc

SEQ ID NO: 2081 - DNA, 24 bp, Homo sapiens
tcaagtgaccattgtgaccaccgc

SEQ ID NO: 2082 - DNA, 23 bp, Homo sapiens
ggtggagggcttgctatggtctg

SEQ ID NO: 2083 - DNA, 26 bp, Homo sapiens
cgcattcttttgccaacaccacatca

SEQ ID NO: 2084 - DNA, 26 bp, Homo sapiens
ctgacccaggaaaaccaccctcattc

SEQ ID NO: 2085 - DNA, 24 bp, Homo sapiens
aaggacccttggccctccaccctt

SEQ ID NO: 2086 - DNA, 24 bp, Homo sapiens
aggcagtgtatactcttccataaa

SEQ ID NO: 2087 - DNA, 26 bp, Homo sapiens
gccctctacttaccaacttctgcctt

SEQ ID NO: 2088 - DNA, 26 bp, Homo sapiens
gcattcctgattgcctgatttcaagt

SEQ ID NO: 2089 - DNA, 26 bp, Homo sapiens
taggcagaacgctttgagagaagtat

SEQ ID NO: 2090 - DNA, 26 bp, Homo sapiens
gtggagggcttgctatggtctgaatg

SEQ ID NO: 2091 - DNA, 23 bp, Homo sapiens
tcagtcaccccatccagcctcat

SEQ ID NO: 2092 - DNA, 23 bp, Homo sapiens
taagaggacctacgcacccgcag

SEQ ID NO: 2093 - DNA, 23 bp, Homo sapiens
tctgttgcgggtctcttgagggc

SEQ ID NO: 2094 - DNA, 23 bp, Homo sapiens
tagtgaagccaggtccaggagca

SEQ ID NO: 2095 - DNA, 25 bp, Homo sapiens
cgggctattagttatgaggtccgaa

SEQ ID NO: 2096 - DNA, 25 bp, Homo sapiens
ccgttactgttggtcgtagagccca

SEQ ID NO: 2097 - DNA, 25 bp, Homo sapiens
gattgaaaaaggtgagggaactcgg

SEQ ID NO: 2098 - DNA, 25 bp, Homo sapiens
gaacgggttggccagatgtgcgaca

SEQ ID NO: 2099 - DNA, 25 bp, Homo sapiens
ccgaacgggaaagacggacatctag

SEQ ID NO: 2100 - DNA, 25 bp, Homo sapiens
atatcgcttagtcgctcttgggccg

SEQ ID NO: 2101 - DNA, 25 bp, Homo sapiens
gcaacctgaccacggttgcgcgtcc

SEQ ID NO: 2102 - DNA, 25 bp, Homo sapiens
cggtgcgctaccttgcaggaattga

SEQ ID NO: 2103 - DNA, 26 bp, Homo sapiens
ttactttgccatctgattgtgcttgc

SEQ ID NO: 2104 - DNA, 26 bp, Homo sapiens
gacctccagcgagaccactcctaaat

SEQ ID NO: 2105 - DNA, 25 bp, Homo sapiens
gaccgtccgttaatttcccttgcat

SEQ ID NO: 2106 - DNA, 25 bp, Homo sapiens
aaccgctctcttagaagagagacag

SEQ ID NO: 2107 - DNA, 60 bp, Homo sapiens; identical to SEQ ID NO: 51

SEQ ID NO: 2108 - DNA, 60 bp, Homo sapiens; identical to SEQ ID NO: 52

SEQ ID NO: 2109 - DNA, 60 bp, Homo sapiens; identical to SEQ ID NO: 53

SEQ ID NO: 2110 - DNA, 60 bp, Homo sapiens; identical to SEQ ID NO: 54

SEQ ID NO: 2111 - DNA, 60 bp, Homo sapiens; identical to SEQ ID NO: 55

SEQ ID NO: 2112 - DNA, 60 bp, Homo sapiens; identical to SEQ ID NO: 56

SEQ ID NO: 2113 - DNA, 60 bp, Homo sapiens; identical to SEQ ID NO: 57

SEQ ID NO: 2114 - DNA, 60 bp, Homo sapiens; identical to SEQ ID NO: 58

SEQ ID NO: 2115 - DNA, 60 bp, Homo sapiens; identical to SEQ ID NO: 59

SEQ ID NO: 2116 - DNA, 60 bp, Homo sapiens; identical to SEQ ID NO: 60

SEQ ID NO: 2117 - DNA, 60 bp, Homo sapiens; identical to SEQ ID NO: 61

SEQ ID NO: 2118 - DNA, 60 bp, Homo sapiens; identical to SEQ ID NO: 62

SEQ ID NO: 2119 - DNA, 60 bp, Homo sapiens; identical to SEQ ID NO: 63

SEQ ID NO: 2120 - DNA, 60 bp, Homo sapiens; identical to SEQ ID NO: 64

SEQ ID NO: 2121 - DNA, 60 bp, Homo sapiens; identical to SEQ ID NO: 65

SEQ ID NO: 2122 - DNA, 60 bp, Homo sapiens; identical to SEQ ID NO: 66

SEQ ID NO: 2123 - DNA, 60 bp, Homo sapiens; identical to SEQ ID NO: 67

SEQ ID NO: 2124 - DNA, 60 bp, Homo sapiens; identical to SEQ ID NO: 68

SEQ ID NO: 2125 - DNA, 60 bp, Homo sapiens; identical to SEQ ID NO: 69

SEQ ID NO: 2126 - DNA, 60 bp, Homo sapiens; identical to SEQ ID NO: 70

SEQ ID NO: 2127 - DNA, 60 bp, Homo sapiens; identical to SEQ ID NO: 71

SEQ ID NO: 2128 - DNA, 60 bp, Homo sapiens; identical to SEQ ID NO: 72

SEQ ID NO: 2129 - DNA, 60 bp, Homo sapiens; identical to SEQ ID NO: 73

SEQ ID NO: 2130 - DNA, 60 bp, Homo sapiens; identical to SEQ ID NO: 74

SEQ ID NO: 2131 - DNA, 60 bp, Homo sapiens; identical to SEQ ID NO: 75

SEQ ID NO: 2132 - DNA, 60 bp, Homo sapiens; identical to SEQ ID NO: 76

SEQ ID NO: 2133 - DNA, 60 bp, Homo sapiens; identical to SEQ ID NO: 77

SEQ ID NO: 2134 - DNA, 60 bp, Homo sapiens; identical to SEQ ID NO: 78

SEQ ID NO: 2135 - DNA, 60 bp, Homo sapiens; identical to SEQ ID NO: 79

SEQ ID NO: 2136 - DNA, 60 bp, Homo sapiens; identical to SEQ ID NO: 80

SEQ ID NO: 2137 - DNA, 60 bp, Homo sapiens; identical to SEQ ID NO: 81

SEQ ID NO: 2138 - DNA, 60 bp, Homo sapiens; identical to SEQ ID NO: 82

SEQ ID NO: 2139 - DNA, 60 bp, Homo sapiens; identical to SEQ ID NO: 83

SEQ ID NO: 2140 - DNA, 60 bp, Homo sapiens; identical to SEQ ID NO: 84

SEQ ID NO: 2141 - DNA, 60 bp, Homo sapiens; identical to SEQ ID NO: 85

SEQ ID NO: 2142 - DNA, 60 bp, Homo sapiens; identical to SEQ ID NO: 86

SEQ ID NO: 2143 - DNA, 60 bp, Homo sapiens; identical to SEQ ID NO: 87

SEQ ID NO: 2144 - DNA, 60 bp, Homo sapiens; identical to SEQ ID NO: 88

SEQ ID NO: 2145 - DNA, 60 bp, Homo sapiens; identical to SEQ ID NO: 89

SEQ ID NO: 2146 - DNA, 60 bp, Homo sapiens; identical to SEQ ID NO: 90

SEQ ID NO: 2147 - DNA, 60 bp, Homo sapiens; identical to SEQ ID NO: 91

SEQ ID NO: 2148 - DNA, 60 bp, Homo sapiens; identical to SEQ ID NO: 92

SEQ ID NO: 2149 - DNA, 60 bp, Homo sapiens; identical to SEQ ID NO: 93

SEQ ID NO: 2150 - DNA, 60 bp, Homo sapiens; identical to SEQ ID NO: 94

SEQ ID NO: 2151 - DNA, 60 bp, Homo sapiens; identical to SEQ ID NO: 95

SEQ ID NO: 2152 - DNA, 60 bp, Homo sapiens; identical to SEQ ID NO: 96

SEQ ID NO: 2153 - DNA, 60 bp, Homo sapiens; identical to SEQ ID NO: 97

SEQ ID NO: 2154 - DNA, 60 bp, Homo sapiens; identical to SEQ ID NO: 98

SEQ ID NO: 2155 - DNA, 60 bp, Homo sapiens; identical to SEQ ID NO: 99

SEQ ID NO: 2156 - DNA, 60 bp, Homo sapiens; identical to SEQ ID NO: 100

SEQ ID NO: 2157 - DNA, 26 bp, Homo sapiens
agggaaagaacttggtttactgctgc

SEQ ID NO: 2158 - DNA, 26 bp, Homo sapiens
gaggtggaggtggatttgctcgtatg

SEQ ID NO: 2159 - DNA, 26 bp, Homo sapiens
cagaggaaaccatcattgttagtagc

SEQ ID NO: 2160 - DNA, 26 bp, Homo sapiens
cccagaacagagaaagggcattaggg

SEQ ID NO: 2161 - DNA, 26 bp, Homo sapiens
ggtggtgtgggtgtcattagtaaact

SEQ ID NO: 2162 - DNA, 26 bp, Homo sapiens
ctgacccaggaaaaccaccctcattc

SEQ ID NO: 2163 - DNA, 26 bp, Homo sapiens
acttctttctctctctgctgactggg

SEQ ID NO: 2164 - DNA, 26 bp, Homo sapiens
gggctgaaaagtttgggaagaacagg

SEQ ID NO: 2165 - DNA, 26 bp, Homo sapiens
cttgtcctgttcccagtttctgaggg

SEQ ID NO: 2166 - DNA, 26 bp, Homo sapiens
ttacaatcgcctcaaagtgctcaagc

SEQ ID NO: 2167 - DNA, 23 bp, Homo sapiens
gcctccctcctcatcacttcctc

SEQ ID NO: 2168 - DNA, 23 bp, Homo sapiens
ccagcccagcactcttgtaactc

SEQ ID NO: 2169 - DNA, 26 bp, Homo sapiens
cctccacccaacagaaaatcctctta

SEQ ID NO: 2170 - DNA, 26 bp, Homo sapiens
agacacagccagcagagacaggaagt

SEQ ID NO: 2171 - DNA, 25 bp, Homo sapiens
atagcttcttaccggtgcgccaccg

SEQ ID NO: 2172 - DNA, 25 bp, Homo sapiens
taggcagtacgatcgcacgccccat

SEQ ID NO: 2173 - DNA, 26 bp, Homo sapiens
cctaaggtgagtaatgttgactggct

SEQ ID NO: 2174 - DNA, 26 bp, Homo sapiens
cacctgttgtaatcctggcactctgg

SEQ ID NO: 2175 - DNA, 23 bp, Homo sapiens
cctgggctcaaccttgctggact

SEQ ID NO: 2176 - DNA, 23 bp, Homo sapiens
gggtgaccgagtgagatgatgtc

SEQ ID NO: 2177 - DNA, 23 bp, Homo sapiens
tcacccctctgcttccaggacag

SEQ ID NO: 2178 - DNA, 23 bp, Homo sapiens
cctccagcgagaccactcctaaa

SEQ ID NO: 2179 - DNA, 25 bp, Homo sapiens
gtgaacgattggtaaacccagtgtc

SEQ ID NO: 2180 - DNA, 25 bp, Homo sapiens
ctgtgagcgacaaaagcttaaatgg

SEQ ID NO: 2181 - DNA, 26 bp, Homo sapiens
tttactgtcttgaaggaggcagggtt

SEQ ID NO: 2182 - DNA, 26 bp, Homo sapiens
gcactgaagagaacacagcaaagccg

SEQ ID NO: 2183 - DNA, 26 bp, Homo sapiens
gtcctaaaagaatcacagttatgcca

SEQ ID NO: 2184 - DNA, 26 bp, Homo sapiens
gcagcgaagaagttgagaagtggaca

SEQ ID NO: 2185 - DNA, 25 bp, Homo sapiens
gaaatacgcgcccataacttggtgc

SEQ ID NO: 2186 - DNA, 25 bp, Homo sapiens
gaatacgggtcgtagcaatgttcgt

SEQ ID NO: 2187 - DNA, 26 bp, Homo sapiens
ccctgtgtgtttcttcccttggctga

SEQ ID NO: 2188 - DNA, 26 bp, Homo sapiens
cccacaaaacttgactctcttccatc

SEQ ID NO: 2189 - DNA, 26 bp, Homo sapiens
agaggttcatcgtctccaggtcatag

SEQ ID NO: 2190 - DNA, 26 bp, Homo sapiens
ttcacacagagaggttgcctggatgt

SEQ ID NO: 2191 - DNA, 23 bp, Homo sapiens
tgtctgtctgtccctgtgaccct

SEQ ID NO: 2192 - DNA, 23 bp, Homo sapiens
caactcacccagagaccccttgc

SEQ ID NO: 2193 - DNA, 26 bp, Homo sapiens
ccaggtagaagtggtttgttacacat

SEQ ID NO: 2194 - DNA, 26 bp, Homo sapiens
ctccctcaaatccagacacctaaaga

SEQ ID NO: 2195 - DNA, 25 bp, Homo sapiens
ctgactatgatctacatattacagg

SEQ ID NO: 2196 - DNA, 25 bp, Homo sapiens
cggtacgtctgctttggtcagcctc

SEQ ID NO: 2197 - DNA, 25 bp, Homo sapiens
taatggctcgtaagatagtgcagcc

SEQ ID NO: 2198 - DNA, 25 bp, Homo sapiens
gctggtgatcactcgatgacctcgg

SEQ ID NO: 2199 - DNA, 23 bp, Homo sapiens
gtcttgtggctgaagtgcccgtt

SEQ ID NO: 2200 - DNA, 23 bp, Homo sapiens
ctctccttccagccttcttgggc

SEQ ID NO: 2201 - DNA, 25 bp, Homo sapiens
ctccccattgcaactacggggattc

SEQ ID NO: 2202 - DNA, 25 bp, Homo sapiens
ttggagagccagctgcgttcgctaa

SEQ ID NO: 2203 - DNA, 26 bp, Homo sapiens
gttttccctgttggtatgtagcctgg

SEQ ID NO: 2204 - DNA, 26 bp, Homo sapiens
actacgaatgataggctgggcacagt

SEQ ID NO: 2205 - DNA, 26 bp, Homo sapiens
cttcagtgtttcctttcagtgatggc

SEQ ID NO: 2206 - DNA, 23 bp, Homo sapiens
atgacatttcgggctgggcacgg

SEQ ID NO: 2207 - DNA, 25 bp, Homo sapiens
tgtgaggacagtgtagtattagcaa

SEQ ID NO: 2208 - DNA, 25 bp, Homo sapiens
acgataagtcccgaactggttgtga

SEQ ID NO: 2209 - DNA, 25 bp, Homo sapiens
cctaacgaaaagtgaacttcataat

SEQ ID NO: 2210 - DNA, 25 bp, Homo sapiens
tcgaatgcagtgatctcccaggtgc

SEQ ID NO: 2211 - DNA, 25 bp, Homo sapiens
acgtgctgtcccacgcacatggtag

SEQ ID NO: 2212 - DNA, 25 bp, Homo sapiens
gaatcaaaaatactaggtaactaga

SEQ ID NO: 2213 - DNA, 25 bp, Homo sapiens
atttggacaaaattgaatggagtct

SEQ ID NO: 2214 - DNA, 25 bp, Homo sapiens
ggatttgcgacgttctaagcgttgg

SEQ ID NO: 2215 - DNA, 25 bp, Homo sapiens
gatcaaccttcacaccgatctagaa

SEQ ID NO: 2216 - DNA, 25 bp, Homo sapiens
tccatgtgaatcgccatccaggatc

SEQ ID NO: 2217 - DNA, 26 bp, Homo sapiens
gccaatgagcaccacatcactatttg

SEQ ID NO: 2218 - DNA, 26 bp, Homo sapiens
ggataagccacaaggcaactggtctg

SEQ ID NO: 2219 - DNA, 25 bp, Homo sapiens
gcaactctcctcctcagcagtctgg

SEQ ID NO: 2220 - DNA, 25 bp, Homo sapiens
tcctagcaaccgggggctgggaatc

SEQ ID NO: 2221 - DNA, 25 bp, Homo sapiens
tctatggaaactacaggactaacct

SEQ ID NO: 2222 - DNA, 25 bp, Homo sapiens
tgtgacatgagtcaagatatttgct

SEQ ID NO: 2223 - DNA, 26 bp, Homo sapiens
gactcatttcagttgttcagaggtcg

SEQ ID NO: 2224 - DNA, 26 bp, Homo sapiens
gacctccagcgagaccactcctaaat

SEQ ID NO: 2225 - DNA, 25 bp, Homo sapiens
cggtaatctatgctctaggcatcta

SEQ ID NO: 2226 - DNA, 25 bp, Homo sapiens
aggactcgtgtcaacgcgcaggctt

SEQ ID NO: 2227 - DNA, 26 bp, Homo sapiens
gcacaatgccagaaacatagtagacg

SEQ ID NO: 2228 - DNA, 26 bp, Homo sapiens
gggaagaatgaatgacgccgaaggac

SEQ ID NO: 2229 - DNA, 23 bp, Homo sapiens
gcccaggacataccacacaccaa

SEQ ID NO: 2230 - DNA, 23 bp, Homo sapiens
gccctcactaaagcccacagcgt

SEQ ID NO: 2231 - DNA, 23 bp, Homo sapiens
cctccagcacacacacactcagt

SEQ ID NO: 2232 - DNA, 23 bp, Homo sapiens
gacctccagcgagaccactccta

SEQ ID NO: 2233 - DNA, 26 bp, Homo sapiens
ttagaatgatagttacctgagaccag

SEQ ID NO: 2234 - DNA, 26 bp, Homo sapiens
cccaggaaaaccaccctcattcaaac

SEQ ID NO: 2235 - DNA, 25 bp, Homo sapiens
tgcgagacaatgctaccttaccggt

SEQ ID NO: 2236 - DNA, 25 bp, Homo sapiens
cattccctcatcacaattgaactaa

SEQ ID NO: 2237 - DNA, 25 bp, Homo sapiens
cggaactcgatcggttgaactctat

SEQ ID NO: 2238 - DNA, 25 bp, Homo sapiens
agggcgcgagacgtattccccggtt

SEQ ID NO: 2239 - DNA, 25 bp, Homo sapiens
cacgcctggtcttcgaagttagcac

SEQ ID NO: 2240 - DNA, 25 bp, Homo sapiens
gctgcttgggaccataaaacctcat

SEQ ID NO: 2241 - DNA, 25 bp, Homo sapiens
atcgagcgggcaatatgtacatatt

SEQ ID NO: 2242 - DNA, 25 bp, Homo sapiens
tcaccgcggaacccgactatgcgac

SEQ ID NO: 2243 - DNA, 25 bp, Homo sapiens
tacctctacaatggatgcgcaaaaa

SEQ ID NO: 2244 - DNA, 25 bp, Homo sapiens
tggacggcctatttaccgagagctg

SEQ ID NO: 2245 - DNA, 23 bp, Homo sapiens
ggaagggcacctccactcatcca

SEQ ID NO: 2246 - DNA, 23 bp, Homo sapiens
ctggctgtcatccaaccaccact

SEQ ID NO: 2247 - DNA, 25 bp, Homo sapiens
ttcgaaggctggttgaatacatggc

SEQ ID NO: 2248 - DNA, 25 bp, Homo sapiens
agaagattgaggtgtcctaaactta

SEQ ID NO: 2249 - DNA, 25 bp, Homo sapiens
cgcggccataacaccttagccgtct

SEQ ID NO: 2250 - DNA, 25 bp, Homo sapiens
cgggggaataagtgacctatgcacc

SEQ ID NO: 2251 - DNA, 23 bp, Homo sapiens
tatgtggacctgatgggcacccc

SEQ ID NO: 2252 - DNA, 26 bp, Homo sapiens
tgctattatctggtgactggactggg

SEQ ID NO: 2253 - DNA, 23 bp, Homo sapiens
tttgaaaagaccgtcgggtgcgg

SEQ ID NO: 2254 - DNA, 23 bp, Homo sapiens
tgaagtggcatctctctcccgcc

SEQ ID NO: 2255 - DNA, 26 bp, Homo sapiens
cacaagaaaataagtctcccaacctg

SEQ ID NO: 2256 - DNA, 26 bp, Homo sapiens
tgactaaaatgttatgtggtgcgtga

SEQ ID NO: 2257 - DNA, 60 bp, Homo sapiens; identical to SEQ ID NO: 101

SEQ ID NO: 2258 - DNA, 60 bp, Homo sapiens; identical to SEQ ID NO: 102

SEQ ID NO: 2259 - DNA, 60 bp, Homo sapiens; identical to SEQ ID NO: 103

SEQ ID NO: 2260 - DNA, 60 bp, Homo sapiens; identical to SEQ ID NO: 104

SEQ ID NO: 2261 - DNA, 60 bp, Homo sapiens; identical to SEQ ID NO: 105

SEQ ID NO: 2262 - DNA, 60 bp, Homo sapiens; identical to SEQ ID NO: 106

SEQ ID NO: 2263 - DNA, 60 bp, Homo sapiens; identical to SEQ ID NO: 107

SEQ ID NO: 2264 - DNA, 60 bp, Homo sapiens; identical to SEQ ID NO: 108

SEQ ID NO: 2265 - DNA, 60 bp, Homo sapiens; identical to SEQ ID NO: 109

SEQ ID NO: 2266 - DNA, 60 bp, Homo sapiens; identical to SEQ ID NO: 110

SEQ ID NO: 2267 - DNA, 60 bp, Homo sapiens; identical to SEQ ID NO: 111

SEQ ID NO: 2268 - DNA, 60 bp, Homo sapiens; identical to SEQ ID NO: 112

SEQ ID NO: 2269 - DNA, 60 bp, Homo sapiens; identical to SEQ ID NO: 113

SEQ ID NO: 2270 - DNA, 60 bp, Homo sapiens; identical to SEQ ID NO: 114

SEQ ID NO: 2271 - DNA, 60 bp, Homo sapiens; identical to SEQ ID NO: 115

SEQ ID NO: 2272 - DNA, 60 bp, Homo sapiens; identical to SEQ ID NO: 116

SEQ ID NO: 2273 - DNA, 60 bp, Homo sapiens; identical to SEQ ID NO: 117

SEQ ID NO: 2274 - DNA, 60 bp, Homo sapiens; identical to SEQ ID NO: 118

SEQ ID NO: 2275 - DNA, 60 bp, Homo sapiens; identical to SEQ ID NO: 119

SEQ ID NO: 2276 - DNA, 60 bp, Homo sapiens; identical to SEQ ID NO: 120

SEQ ID NO: 2277 - DNA, 60 bp, Homo sapiens; identical to SEQ ID NO: 361

SEQ ID NO: 2278 - DNA, 60 bp, Homo sapiens; identical to SEQ ID NO: 362

SEQ ID NO: 2279 - DNA, 60 bp, Homo sapiens; identical to SEQ ID NO: 363

SEQ ID NO: 2280 - DNA, 60 bp, Homo sapiens; identical to SEQ ID NO: 364

SEQ ID NO: 2281 - DNA, 60 bp, Homo sapiens; identical to SEQ ID NO: 365

SEQ ID NO: 2282 - DNA, 60 bp, Homo sapiens; identical to SEQ ID NO: 366

SEQ ID NO: 2283 - DNA, 60 bp, Homo sapiens; identical to SEQ ID NO: 367

SEQ ID NO: 2284 - DNA, 60 bp, Homo sapiens; identical to SEQ ID NO: 368

SEQ ID NO: 2285 - DNA, 60 bp, Homo sapiens; identical to SEQ ID NO: 369

SEQ ID NO: 2286 - DNA, 60 bp, Homo sapiens; identical to SEQ ID NO: 370

SEQ ID NO: 2287 - DNA, 60 bp, Homo sapiens; identical to SEQ ID NO: 371

SEQ ID NO: 2288 - DNA, 60 bp, Homo sapiens; identical to SEQ ID NO: 372

SEQ ID NO: 2289 - DNA, 60 bp, Homo sapiens; identical to SEQ ID NO: 373

SEQ ID NO: 2290 - DNA, 60 bp, Homo sapiens; identical to SEQ ID NO: 374

SEQ ID NO: 2291 - DNA, 60 bp, Homo sapiens; identical to SEQ ID NO: 375

SEQ ID NO: 2292 - DNA, 60 bp, Homo sapiens; identical to SEQ ID NO: 376

SEQ ID NO: 2293 - DNA, 60 bp, Homo sapiens; identical to SEQ ID NO: 377

SEQ ID NO: 2294 - DNA, 60 bp, Homo sapiens; identical to SEQ ID NO: 378

SEQ ID NO: 2295 - DNA, 60 bp, Homo sapiens; identical to SEQ ID NO: 379

SEQ ID NO: 2296 - DNA, 60 bp, Homo sapiens; identical to SEQ ID NO: 380

SEQ ID NO: 2297 - DNA, 60 bp, Homo sapiens; identical to SEQ ID NO: 381

SEQ ID NO: 2298 - DNA, 60 bp, Homo sapiens; identical to SEQ ID NO: 382

SEQ ID NO: 2299 - DNA, 60 bp, Homo sapiens; identical to SEQ ID NO: 383

SEQ ID NO: 2300 - DNA, 60 bp, Homo sapiens; identical to SEQ ID NO: 384

SEQ ID NO: 2301 - DNA, 60 bp, Homo sapiens; identical to SEQ ID NO: 385

SEQ ID NO: 2302 - DNA, 60 bp, Homo sapiens; identical to SEQ ID NO: 386

SEQ ID NO: 2303 - DNA, 60 bp, Homo sapiens; identical to SEQ ID NO: 387

SEQ ID NO: 2304 - DNA, 60 bp, Homo sapiens; identical to SEQ ID NO: 388

SEQ ID NO: 2305 - DNA, 60 bp, Homo sapiens; identical to SEQ ID NO: 389

SEQ ID NO: 2306 - DNA, 60 bp, Homo sapiens; identical to SEQ ID NO: 390

SEQ ID NO: 2307 - DNA, 23 bp, Homo sapiens
gggtgttgcgagcagcctgaatg

SEQ ID NO: 2308 - DNA, 23 bp, Homo sapiens
gggcgataatgctggagacacag

SEQ ID NO: 2309 - DNA, 25 bp, Homo sapiens
agacgccgcttgcgatttcgaccaa

SEQ ID NO: 2310 - DNA, 25 bp, Homo sapiens
cagcgggaacggctgtgcagtcaca

SEQ ID NO: 2311 - DNA, 26 bp, Homo sapiens
gactttgtatgcttggctcttttcaa

SEQ ID NO: 2312 - DNA, 26 bp, Homo sapiens
ctgcgtgaagattgggaaaatactct

SEQ ID NO: 2313 - DNA, 23 bp, Homo sapiens
tggacagagcacctcctgatagc

SEQ ID NO: 2314 - DNA, 23 bp, Homo sapiens
cagtgagatgatgggcaccaggg

SEQ ID NO: 2315 - DNA, 23 bp, Homo sapiens
ctcagtagtggctctccttcccc

SEQ ID NO: 2316 - DNA, 23 bp, Homo sapiens
cctccagcgagaccactcctaaa

SEQ ID NO: 2317 - DNA, 25 bp, Homo sapiens
ccgctgtgtagcggacagtctgagc

SEQ ID NO: 2318 - DNA, 25 bp, Homo sapiens
taccctctcaagcacgagatctaca

SEQ ID NO: 2319 - DNA, 26 bp, Homo sapiens
cttcttgcttttcaatcaggatgcct

SEQ ID NO: 2320 - DNA, 26 bp, Homo sapiens
cctccatctcttgccttctccttagg

SEQ ID NO: 2321 - DNA, 25 bp, Homo sapiens
gggcggggtagaagccgtcgcttcg

SEQ ID NO: 2322 - DNA, 25 bp, Homo sapiens
ggtccatgcggggggtaaaaccctg

SEQ ID NO: 2323 - DNA, 26 bp, Homo sapiens
tttctgataccatctgcgagccctgc

SEQ ID NO: 2324 - DNA, 26 bp, Homo sapiens
agtcagggaaataactcactgggaag

SEQ ID NO: 2325 - DNA, 23 bp, Homo sapiens
caaggtggtccccgagttgccat

SEQ ID NO: 2326 - DNA, 23 bp, Homo sapiens
gaggtggaggtggatttgctcgt

SEQ ID NO: 2327 - DNA, 23 bp, Homo sapiens
ccaagatactgccctgggtctcc

SEQ ID NO: 2328 - DNA, 23 bp, Homo sapiens
ccccaccctgaccaactgaatca

SEQ ID NO: 2329 - DNA, 26 bp, Homo sapiens
tctggcttttgcctgtccttctgatg

SEQ ID NO: 2330 - DNA, 26 bp, Homo sapiens
ccactcttgacctcagtttccctgta

SEQ ID NO: 2331 - DNA, 25 bp, Homo sapiens
tttaagaggtccgggcagcatacgc

SEQ ID NO: 2332 - DNA, 25 bp, Homo sapiens
tgtggtttatgtgctactgtggaga

SEQ ID NO: 2333 - DNA, 25 bp, Homo sapiens
gcggcacccatctctcttcattcgc

SEQ ID NO: 2334 - DNA, 25 bp, Homo sapiens
gggtttgtgaatctaggagcacaaa

SEQ ID NO: 2335 - DNA, 25 bp, Homo sapiens
ttattgtgaacgttcgaaagcacaa

SEQ ID NO: 2336 - DNA, 25 bp, Homo sapiens
aaagcggcgcacttcaggcataaaa

SEQ ID NO: 2337 - DNA, 23 bp, Homo sapiens
ggcagaatagtctcatccagccc

SEQ ID NO: 2338 - DNA, 23 bp, Homo sapiens
tgaagccaggtccaggagcagtg

SEQ ID NO: 2339 - DNA, 26 bp, Homo sapiens
ggtttcacagtatggatttggtgttc

SEQ ID NO: 2340 - DNA, 26 bp, Homo sapiens
gcctgggtattctactgtcagagatt

SEQ ID NO: 2341 - DNA, 26 bp, Homo sapiens
catttacgggagtggtggacaacaca

SEQ ID NO: 2342 - DNA, 26 bp, Homo sapiens
ttaggtctgggctcagtgacttatgc

SEQ ID NO: 2343 - DNA, 25 bp, Homo sapiens
ggatggatttttgacaatccccgat

SEQ ID NO: 2344 - DNA, 25 bp, Homo sapiens
aatgctagggagcaataaacataac

SEQ ID NO: 2345 - DNA, 25 bp, Homo sapiens
gtccaagctatggtcccttaacagc

SEQ ID NO: 2346 - DNA, 25 bp, Homo sapiens
catccacagtgaattgatccgaagg

SEQ ID NO: 2347 - DNA, 26 bp, Homo sapiens
gccaaaacaaagtgtcctcatctggg

SEQ ID NO: 2348 - DNA, 26 bp, Homo sapiens
aagggtatgggaaaacaggcatctgc

SEQ ID NO: 2349 - DNA, 26 bp, Homo sapiens
gagtctcacttagaacctgctactgt

SEQ ID NO: 2350 - DNA, 26 bp, Homo sapiens
cccagaacagagaaagggcattaggg

SEQ ID NO: 2351 - DNA, 25 bp, Homo sapiens
gggtcggcatcggaagcttgaaatt

SEQ ID NO: 2352 - DNA, 25 bp, Homo sapiens
gagaagcggggagttaccggtcaat

SEQ ID NO: 2353 - DNA, 26 bp, Homo sapiens
aacaccaactccttccccattctaat

SEQ ID NO: 2354 - DNA, 26 bp, Homo sapiens
ggacccacaaaacttgactctcttcc

SEQ ID NO: 2355 - DNA, 25 bp, Homo sapiens
acgagcatacagacaatcgtcgtcg

SEQ ID NO: 2356 - DNA, 25 bp, Homo sapiens
atactctccagccgactgaaaacgg

SEQ ID NO: 2357 - DNA, 26 bp, Homo sapiens
atgggaactccagacaccaatggctg

SEQ ID NO: 2358 - DNA, 26 bp, Homo sapiens
aaacctaccgctttgacctcacagaa

SEQ ID NO: 2359 - DNA, 23 bp, Homo sapiens
tctcacccctactcccacctcac

SEQ ID NO: 2360 - DNA, 23 bp, Homo sapiens
gaagacacagcagaggacacagc

SEQ ID NO: 2361 - DNA, 23 bp, Homo sapiens
ccagagtgagtcaaggaggcacg

SEQ ID NO: 2362 - DNA, 23 bp, Homo sapiens
tttcaggcgtccctttcccttgc

SEQ ID NO: 2363 - DNA, 26 bp, Homo sapiens
ctgacccattttccctctcctgtgat

SEQ ID NO: 2364 - DNA, 26 bp, Homo sapiens
gcaggaacaacagaaagtagaaacag

SEQ ID NO: 2365 - DNA, 23 bp, Homo sapiens
agggatggtggctcaatgctgcc

SEQ ID NO: 2366 - DNA, 23 bp, Homo sapiens
cctggagaaaacttgctgccgag

SEQ ID NO: 2367 - DNA, 25 bp, Homo sapiens
gagaaaaaaccactggaaatggcag

SEQ ID NO: 2368 - DNA, 25 bp, Homo sapiens
taccagctcgacattcgcgtgcccc

SEQ ID NO: 2369 - DNA, 23 bp, Homo sapiens
tcctggacagtcagcaaacctgc

SEQ ID NO: 2370 - DNA, 23 bp, Homo sapiens
cagccagcagagacaggaagtgc

SEQ ID NO: 2371 - DNA, 23 bp, Homo sapiens
gtcagaggcaaggaggaaggacc

SEQ ID NO: 2372 - DNA, 23 bp, Homo sapiens
gcggaacttcaaaggtcaggtgc

SEQ ID NO: 2373 - DNA, 23 bp, Homo sapiens
tcagacagccttcccaagccctg

SEQ ID NO: 2374 - DNA, 23 bp, Homo sapiens
acacactttcactccctgtcccc

SEQ ID NO: 2375 - DNA, 26 bp, Homo sapiens
tctgtaacaccaagtggaaagcagtg

SEQ ID NO: 2376 - DNA, 25 bp, Homo sapiens
taaaagcaggaactggctgggcgtg

SEQ ID NO: 2377 - DNA, 25 bp, Homo sapiens
cggccaaccgttcattggagcaata

SEQ ID NO: 2378 - DNA, 25 bp, Homo sapiens
gctaggcaacagctggatctacaga

SEQ ID NO: 2379 - DNA, 25 bp, Homo sapiens
agtggatggatgagcgccacatgta

SEQ ID NO: 2380 - DNA, 25 bp, Homo sapiens
agcgcgattgtcgggcacattagat

SEQ ID NO: 2381 - DNA, 25 bp, Homo sapiens
ttgcctaatgggcctctttggtcat

SEQ ID NO: 2382 - DNA, 25 bp, Homo sapiens
taagtcacagtgacagcttctactt

SEQ ID NO: 2383 - DNA, 26 bp, Homo sapiens
ccttaggattttctcaacaagccatt

SEQ ID NO: 2384 - DNA, 26 bp, Homo sapiens
cctccagcgagaccactcctaaataa

SEQ ID NO: 2385 - DNA, 23 bp, Homo sapiens
cacctcaactccaagaaggcggg

SEQ ID NO: 2386 - DNA, 23 bp, Homo sapiens
gcggaacttcaaaggtcaggtgc

SEQ ID NO: 2387 - DNA, 23 bp, Homo sapiens
ccagatgctcccaatcccagtca

SEQ ID NO: 2388 - DNA, 23 bp, Homo sapiens
tagtggattcctggctgggcacg

SEQ ID NO: 2389 - DNA, 23 bp, Homo sapiens
aacccaaccgtccagagtccacg

SEQ ID NO: 2390 - DNA, 23 bp, Homo sapiens
cctgtggaaggtgggactatgag

SEQ ID NO: 2391 - DNA, 25 bp, Homo sapiens
ggctaggtcgtcgtgcgctccgtct

SEQ ID NO: 2392 - DNA, 25 bp, Homo sapiens
gtacgcaggggaccagtcgatagct

SEQ ID NO: 2393 - DNA, 26 bp, Homo sapiens
accctgtagtcctgggctcaagagat

SEQ ID NO: 2394 - DNA, 26 bp, Homo sapiens
tgcccaataaaagaaaccatcaaggg

SEQ ID NO: 2395 - DNA, 23 bp, Homo sapiens
gggaggcacaggaagggaagttg

SEQ ID NO: 2396 - DNA, 23 bp, Homo sapiens
gctgcctaagggtctctttggtc

SEQ ID NO: 2397 - DNA, 23 bp, Homo sapiens
gagcagagtgaggactggaatcc

SEQ ID NO: 2398 - DNA, 23 bp, Homo sapiens
cctgggctcaaccttgctggact

SEQ ID NO: 2399 - DNA, 26 bp, Homo sapiens
gtatcagaggtaatcaagtaaccaag

SEQ ID NO: 2400 - DNA, 26 bp, Homo sapiens
attacctcatttatgcctcacaccat

SEQ ID NO: 2401 - DNA, 26 bp, Homo sapiens
gctacggttcacaaggtgcttagaaa

SEQ ID NO: 2402 - DNA, 23 bp, Homo sapiens
gggaaggaaaagagggcaagtcc

SEQ ID NO: 2403 - DNA, 23 bp, Homo sapiens
cctgacccaccaagactgaacca

SEQ ID NO: 2404 - DNA, 23 bp, Homo sapiens
gtgccaccctgggctggatgatt

SEQ ID NO: 2405 - DNA, 23 bp, Homo sapiens
gcctctggtgcccttttgggttg

SEQ ID NO: 2406 - DNA, 23 bp, Homo sapiens
gagcagagtgaggactggaatcc

SEQ ID NO: 2407 - DNA, 60 bp, Homo sapiens; identical to SEQ ID NO: 391

SEQ ID NO: 2408 - DNA, 60 bp, Homo sapiens; identical to SEQ ID NO: 392

SEQ ID NO: 2409 - DNA, 60 bp, Homo sapiens; identical to SEQ ID NO: 393

SEQ ID NO: 2410 - DNA, 60 bp, Homo sapiens; identical to SEQ ID NO: 394

SEQ ID NO: 2411 - DNA, 60 bp, Homo sapiens; identical to SEQ ID NO: 395

SEQ ID NO: 2412 - DNA, 60 bp, Homo sapiens; identical to SEQ ID NO: 396

SEQ ID NO: 2413 - DNA, 60 bp, Homo sapiens; identical to SEQ ID NO: 397

SEQ ID NO: 2414 - DNA, 60 bp, Homo sapiens; identical to SEQ ID NO: 398

SEQ ID NO: 2415 - DNA, 60 bp, Homo sapiens; identical to SEQ ID NO: 399

SEQ ID NO: 2416 - DNA, 60 bp, Homo sapiens; identical to SEQ ID NO: 400

SEQ ID NO: 2417 - DNA, 60 bp, Homo sapiens; identical to SEQ ID NO: 401

SEQ ID NO: 2418 - DNA, 60 bp, Homo sapiens; identical to SEQ ID NO: 402

SEQ ID NO: 2419 - DNA, 60 bp, Homo sapiens; identical to SEQ ID NO: 403

SEQ ID NO: 2420 - DNA, 60 bp, Homo sapiens; identical to SEQ ID NO: 404

SEQ ID NO: 2421 - DNA, 60 bp, Homo sapiens; identical to SEQ ID NO: 405

SEQ ID NO: 2422 - DNA, 60 bp, Homo sapiens; identical to SEQ ID NO: 406

SEQ ID NO: 2423 - DNA, 60 bp, Homo sapiens; identical to SEQ ID NO: 407

SEQ ID NO: 2424 - DNA, 60 bp, Homo sapiens; identical to SEQ ID NO: 408

SEQ ID NO: 2425 - DNA, 60 bp, Homo sapiens; identical to SEQ ID NO: 409

SEQ ID NO: 2426 - DNA, 60 bp, Homo sapiens; identical to SEQ ID NO: 410

SEQ ID NO: 2427 - DNA, 60 bp, Homo sapiens; identical to SEQ ID NO: 411

SEQ ID NO: 2428 - DNA, 60 bp, Homo sapiens; identical to SEQ ID NO: 412

SEQ ID NO: 2429 - DNA, 60 bp, Homo sapiens; identical to SEQ ID NO: 413

SEQ ID NO: 2430 - DNA, 60 bp, Homo sapiens; identical to SEQ ID NO: 414

SEQ ID NO: 2431 - DNA, 60 bp, Homo sapiens; identical to SEQ ID NO: 415

SEQ ID NO: 2432 - DNA, 60 bp, Homo sapiens; identical to SEQ ID NO: 416

SEQ ID NO: 2433 - DNA, 60 bp, Homo sapiens; identical to SEQ ID NO: 417

SEQ ID NO: 2434 - DNA, 60 bp, Homo sapiens; identical to SEQ ID NO: 418

SEQ ID NO: 2435 - DNA, 60 bp, Homo sapiens; identical to SEQ ID NO: 419

SEQ ID NO: 2436 - DNA, 60 bp, Homo sapiens; identical to SEQ ID NO: 420

SEQ ID NO: 2437 - DNA, 60 bp, Homo sapiens; identical to SEQ ID NO: 421

SEQ ID NO: 2438 - DNA, 60 bp, Homo sapiens; identical to SEQ ID NO: 422

SEQ ID NO: 2439 - DNA, 60 bp, Homo sapiens; identical to SEQ ID NO: 423

SEQ ID NO: 2440 - DNA, 60 bp, Homo sapiens; identical to SEQ ID NO: 424

SEQ ID NO: 2441 - DNA, 60 bp, Homo sapiens; identical to SEQ ID NO: 425

SEQ ID NO: 2442 - DNA, 60 bp, Homo sapiens; identical to SEQ ID NO: 426

SEQ ID NO: 2443 - DNA, 60 bp, Homo sapiens; identical to SEQ ID NO: 427

SEQ ID NO: 2444 - DNA, 60 bp, Homo sapiens; identical to SEQ ID NO: 428

SEQ ID NO: 2445 - DNA, 60 bp, Homo sapiens; identical to SEQ ID NO: 429

SEQ ID NO: 2446 - DNA, 60 bp, Homo sapiens; identical to SEQ ID NO: 430

SEQ ID NO: 2447 - DNA, 60 bp, Homo sapiens; identical to SEQ ID NO: 431

SEQ ID NO: 2448 - DNA, 60 bp, Homo sapiens; identical to SEQ ID NO: 432

SEQ ID NO: 2449 - DNA, 60 bp, Homo sapiens; identical to SEQ ID NO: 433

SEQ ID NO: 2450 - DNA, 60 bp, Homo sapiens; identical to SEQ ID NO: 434

SEQ ID NO: 2451 - DNA, 60 bp, Homo sapiens; identical to SEQ ID NO: 435

SEQ ID NO: 2452 - DNA, 60 bp, Homo sapiens; identical to SEQ ID NO: 436

SEQ ID NO: 2453 - DNA, 60 bp, Homo sapiens; identical to SEQ ID NO: 437

SEQ ID NO: 2454 - DNA, 60 bp, Homo sapiens; identical to SEQ ID NO: 438

SEQ ID NO: 2455 - DNA, 60 bp, Homo sapiens; identical to SEQ ID NO: 439

SEQ ID NO: 2456 - DNA, 60 bp, Homo sapiens; identical to SEQ ID NO: 440

SEQ ID NO: 2457 - DNA, 23 bp, Homo sapiens
aggctaccttgacgctcaccctg

SEQ ID NO: 2458 - DNA, 23 bp, Homo sapiens
ggagtaggtggagcccaaaggat

SEQ ID NO: 2459 - DNA, 23 bp, Homo sapiens
caccagggtatttcccagcagcc

SEQ ID NO: 2460 - DNA, 23 bp, Homo sapiens
ctgacccaggaaaaccaccctca

SEQ ID NO: 2461 - DNA, 26 bp, Homo sapiens
gaccttcaatacccaaagtaagcctt

SEQ ID NO: 2462 - DNA, 26 bp, Homo sapiens
ctgtcccatctgcctaaaaccgttgg

SEQ ID NO: 2463 - DNA, 23 bp, Homo sapiens
catctccctcccctcctttcagc

SEQ ID NO: 2464 - DNA, 23 bp, Homo sapiens
gctgtcactcccaagagaagcct

SEQ ID NO: 2465 - DNA, 26 bp, Homo sapiens
aatcttgctactgcccattagaaagg

SEQ ID NO: 2466 - DNA, 26 bp, Homo sapiens
cccagaacagagaaagggcattaggg

SEQ ID NO: 2467 - DNA, 24 bp, Homo sapiens
gggatgtccttgcttgttcctgat

SEQ ID NO: 2468 - DNA, 26 bp, Homo sapiens
gattccaaaggtccgaaagcaacggg

SEQ ID NO: 2469 - DNA, 23 bp, Homo sapiens
ccatctgctccaggtatgaccct

SEQ ID NO: 2470 - DNA, 23 bp, Homo sapiens
cctgggctcaaccttgctggact

SEQ ID NO: 2471 - DNA, 26 bp, Homo sapiens
ggacctgaatcttccactctgtcttt

SEQ ID NO: 2472 - DNA, 26 bp, Homo sapiens
ctgtcccatctgcctaaaaccgttgg

SEQ ID NO: 2473 - DNA, 26 bp, Homo sapiens
tacctctcctctccccgcaaaacact

SEQ ID NO: 2474 - DNA, 26 bp, Homo sapiens
actgtgaccaaaggaaggaaagccat

SEQ ID NO: 2475 - DNA, 26 bp, Homo sapiens
ggcagtgaataacctgtggaaagatt

SEQ ID NO: 2476 - DNA, 24 bp, Homo sapiens
cacccagtcacccaggcttgtgta

SEQ ID NO: 2477 - DNA, 25 bp, Homo sapiens
acagccccatctcagggataggttc

SEQ ID NO: 2478 - DNA, 26 bp, Homo sapiens
ataaaagtggttgtattggctgggcg

SEQ ID NO: 2479 - DNA, 26 bp, Homo sapiens
gcatcctaagaaagtcactatgtgct

SEQ ID NO: 2480 - DNA, 26 bp, Homo sapiens
gtcacctttcgtcttttccatttccc

SEQ ID NO: 2481 - DNA, 26 bp, Homo sapiens
cacatctcaggtctacgcctctcaag

SEQ ID NO: 2482 - DNA, 26 bp, Homo sapiens
cagaacacagtgaacaaccaggcatt

SEQ ID NO: 2483 - DNA, 26 bp, Homo sapiens
gatgtggtcagttgtaggagcagact

SEQ ID NO: 2484 - DNA, 26 bp, Homo sapiens
cctccagcgagaccactcctaaataa

SEQ ID NO: 2485 - DNA, 26 bp, Homo sapiens
gacaagatagttttggattgccacca

SEQ ID NO: 2486 - DNA, 26 bp, Homo sapiens
gggaagaaaagatggaagtgggtcat

SEQ ID NO: 2487 - DNA, 26 bp, Homo sapiens
ggtggtaaacatttggcttttcccag

SEQ ID NO: 2488 - DNA, 26 bp, Homo sapiens
aatacagcggagtcagggaggcaaga

SEQ ID NO: 2489 - DNA, 26 bp, Homo sapiens
gttaccagcaaatcttccatcagttc

SEQ ID NO: 2490 - DNA, 26 bp, Homo sapiens
gattccaaaggtccgaaagcaacggg

SEQ ID NO: 2491 - DNA, 26 bp, Homo sapiens
ctcaagtcaagagaggagacagccat

SEQ ID NO: 2492 - DNA, 26 bp, Homo sapiens
ccagagacaggttgaggagtagaaag

SEQ ID NO: 2493 - DNA, 24 bp, Homo sapiens
tgtcaagcgggggcctcaagttat

SEQ ID NO: 2494 - DNA, 23 bp, Homo sapiens
gaaggacggaaaccagaattact

SEQ ID NO: 2495 - DNA, 24 bp, Homo sapiens
cgcggcatctaattttagtgtatt

SEQ ID NO: 2496 - DNA, 23 bp, Homo sapiens
ttgactgcgagttcgctactagt

SEQ ID NO: 2497 - DNA, 24 bp, Homo sapiens
ccgactgcccttgtccaatggtgg

SEQ ID NO: 2498 - DNA, 25 bp, Homo sapiens
acccgatgagttgccgacttttagg

SEQ ID NO: 2499 - DNA, 23 bp, Homo sapiens
gctgccctgaaaatgggagtctg

SEQ ID NO: 2500 - DNA, 23 bp, Homo sapiens
ggcagatgggaagcagcgtccta

SEQ ID NO: 2501 - DNA, 25 bp, Homo sapiens
gcgtgatagactatgcactagggtc

SEQ ID NO: 2502 - DNA, 24 bp, Homo sapiens
acggcctatttaccgagagctgtt

SEQ ID NO: 2503 - DNA, 23 bp, Homo sapiens
ttcagagccggtagatgtatggc

SEQ ID NO: 2504 - DNA, 24 bp, Homo sapiens
gaaggctggttgaatacatggcag

SEQ ID NO: 2505 - DNA, 23 bp, Homo sapiens
tacgtgtacgagctcctgcagga

SEQ ID NO: 2506 - DNA, 23 bp, Homo sapiens
agattgaggtgtcctaaacttac

SEQ ID NO: 2507 - DNA, 23 bp, Homo sapiens
tcaaatcgcatccgccgtgcaca

SEQ ID NO: 2508 - DNA, 24 bp, Homo sapiens
cggccataacaccttagccgtctc

SEQ ID NO: 2509 - DNA, 25 bp, Homo sapiens
gagatcgggcacagatgtgacttct

SEQ ID NO: 2510 - DNA, 25 bp, Homo sapiens
ggggaataagtgacctatgcaccag

SEQ ID NO: 2511 - DNA, 23 bp, Homo sapiens
gcgcacgacgtcctgatccaccc

SEQ ID NO: 2512 - DNA, 23 bp, Homo sapiens
cgccgcttgcgatttcgaccaac

SEQ ID NO: 2513 - DNA, 23 bp, Homo sapiens
attccgcctatacggatgcgttc

SEQ ID NO: 2514 - DNA, 23 bp, Homo sapiens
gcgggaacggctgtgcagtcaca

SEQ ID NO: 2515 - DNA, 24 bp, Homo sapiens
catacctatcccgaatgcttaagt

SEQ ID NO: 2516 - DNA, 23 bp, Homo sapiens
cgctgtgtagcggacagtctgag

SEQ ID NO: 2517 - DNA, 23 bp, Homo sapiens
agggagttacaggctttcagtaa

SEQ ID NO: 2518 - DNA, 24 bp, Homo sapiens
taccctctcaagcacgagatctac

SEQ ID NO: 2519 - DNA, 25 bp, Homo sapiens
cttaaagtgatgcaggtacatccat

SEQ ID NO: 2520 - DNA, 23 bp, Homo sapiens
gggcggggtagaagccgtcgctt

SEQ ID NO: 2521 - DNA, 24 bp, Homo sapiens
gtggagtgtttaacactaccttcc

SEQ ID NO: 2522 - DNA, 23 bp, Homo sapiens
gggtccatgcggggggtaaaacc

SEQ ID NO: 2523 - DNA, 25 bp, Homo sapiens
ggtgtctcgtgcacaccctggtagc

SEQ ID NO: 2524 - DNA, 24 bp, Homo sapiens
tgtttaagaggtccgggcagcata

SEQ ID NO: 2525 - DNA, 26 bp, Homo sapiens
acctggaaaccctcctgctgaaatag

SEQ ID NO: 2526 - DNA, 26 bp, Homo sapiens
aaatctggactctgccttcttggagc

SEQ ID NO: 2527 - DNA, 23 bp, Homo sapiens
ccgctctctcttctgtgtcttgg

SEQ ID NO: 2528 - DNA, 23 bp, Homo sapiens
ggtcagtgtggcaaagtgggagc

SEQ ID NO: 2529 - DNA, 24 bp, Homo sapiens
ccctgctacagatgatgctgcctg

SEQ ID NO: 2530 - DNA, 23 bp, Homo sapiens
cagggtctgtcccatctgcctaa

SEQ ID NO: 2531 - DNA, 26 bp, Homo sapiens
cccagcagcaactgtttatcagcaat

SEQ ID NO: 2532 - DNA, 26 bp, Homo sapiens
actgcggaacttcaaaggtcaggtgc

SEQ ID NO: 2533 - DNA, 24 bp, Homo sapiens
gcgcggcacccatctctcttcatt

SEQ ID NO: 2534 - DNA, 24 bp, Homo sapiens
aaaaaagcggcgcacttcaggcat

SEQ ID NO: 2535 - DNA, 23 bp, Homo sapiens
gcttattgtgaacgttcgaaagc

SEQ ID NO: 2536 - DNA, 23 bp, Homo sapiens
aaaggatggatttttgacaatcc

SEQ ID NO: 2537 - DNA, 23 bp, Homo sapiens
caatgtggtttatgtgctactgt

SEQ ID NO: 2538 - DNA, 23 bp, Homo sapiens
cgatgtccaagctatggtccctt

SEQ ID NO: 2539 - DNA, 25 bp, Homo sapiens
gagagggtttgtgaatctaggagca

SEQ ID NO: 2540 - DNA, 23 bp, Homo sapiens
acagcaatgctagggagcaataa

SEQ ID NO: 2541 - DNA, 26 bp, Homo sapiens
ccgtgctttgaaaatccccagatgtc

SEQ ID NO: 2542 - DNA, 26 bp, Homo sapiens
attctcactcccctaccttcagtctg

SEQ ID NO: 2543 - DNA, 25 bp, Homo sapiens
cgtcgatactctccagccgactgaa

SEQ ID NO: 2544 - DNA, 25 bp, Homo sapiens
acagaagcgcgattgtcgggcacat

SEQ ID NO: 2545 - DNA, 23 bp, Homo sapiens
acgggagaaaaaaccactggaaa

SEQ ID NO: 2546 - DNA, 25 bp, Homo sapiens
agattatagtgttgaaaaagtcctt

SEQ ID NO: 2547 - DNA, 25 bp, Homo sapiens
ggcagtaccagctcgacattcgcgt

SEQ ID NO: 2548 - DNA, 25 bp, Homo sapiens
ttcgacggcgtggggagtctctcca

SEQ ID NO: 2549 - DNA, 24 bp, Homo sapiens
cccccggccaaccgttcattggag

SEQ ID NO: 2550 - DNA, 23 bp, Homo sapiens
cgtgatttacggacgcgaattta

SEQ ID NO: 2551 - DNA, 24 bp, Homo sapiens
aataagtggatggatgagcgccac

SEQ ID NO: 2552 - DNA, 23 bp, Homo sapiens
acataagtcacagtgacagcttc

SEQ ID NO: 2553 - DNA, 23 bp, Homo sapiens
tgtattgcctaatgggcctcttt

SEQ ID NO: 2554 - DNA, 25 bp, Homo sapiens
acttggctaggtcgtcgtgcgctcc

SEQ ID NO: 2555 - DNA, 24 bp, Homo sapiens
gtcatgctaggcaacagctggatc

SEQ ID NO: 2556 - DNA, 25 bp, Homo sapiens
tctgtacgcaggggaccagtcgata

SEQ ID NO: 2557 - DNA, 60 bp, Homo sapiens; identical to SEQ ID NO: 441

SEQ ID NO: 2558 - DNA, 60 bp, Homo sapiens; identical to SEQ ID NO: 442

SEQ ID NO: 2559 - DNA, 60 bp, Homo sapiens; identical to SEQ ID NO: 443

SEQ ID NO: 2560 - DNA, 60 bp, Homo sapiens; identical to SEQ ID NO: 444

SEQ ID NO: 2561 - DNA, 60 bp, Homo sapiens; identical to SEQ ID NO: 445

SEQ ID NO: 2562 - DNA, 60 bp, Homo sapiens; identical to SEQ ID NO: 446

SEQ ID NO: 2563 - DNA, 60 bp, Homo sapiens; identical to SEQ ID NO: 447

SEQ ID NO: 2564 - DNA, 60 bp, Homo sapiens; identical to SEQ ID NO: 448

SEQ ID NO: 2565 - DNA, 60 bp, Homo sapiens; identical to SEQ ID NO: 449

SEQ ID NO: 2566 - DNA, 60 bp, Homo sapiens; identical to SEQ ID NO: 450

SEQ ID NO: 2567 - DNA, 60 bp, Homo sapiens; identical to SEQ ID NO: 451

SEQ ID NO: 2568 - DNA, 60 bp, Homo sapiens; identical to SEQ ID NO: 452

SEQ ID NO: 2569 - DNA, 60 bp, Homo sapiens; identical to SEQ ID NO: 453

SEQ ID NO: 2570 - DNA, 60 bp, Homo sapiens; identical to SEQ ID NO: 454

SEQ ID NO: 2571 - DNA, 60 bp, Homo sapiens; identical to SEQ ID NO: 455

SEQ ID NO: 2572 - DNA, 60 bp, Homo sapiens; identical to SEQ ID NO: 456

SEQ ID NO: 2573 - DNA, 60 bp, Homo sapiens; identical to SEQ ID NO: 457

SEQ ID NO: 2574 - DNA, 60 bp, Homo sapiens; identical to SEQ ID NO: 458

SEQ ID NO: 2575 - DNA, 60 bp, Homo sapiens; identical to SEQ ID NO: 459

SEQ ID NO: 2576 - DNA, 60 bp, Homo sapiens; identical to SEQ ID NO: 460

SEQ ID NO: 2577 - DNA, 60 bp, Homo sapiens; identical to SEQ ID NO: 461

SEQ ID NO: 2578 - DNA, 60 bp, Homo sapiens; identical to SEQ ID NO: 462

SEQ ID NO: 2579 - DNA, 60 bp, Homo sapiens; identical to SEQ ID NO: 463

SEQ ID NO: 2580 - DNA, 60 bp, Homo sapiens; identical to SEQ ID NO: 464

SEQ ID NO: 2581 - DNA, 60 bp, Homo sapiens; identical to SEQ ID NO: 465

SEQ ID NO: 2582 - DNA, 60 bp, Homo sapiens; identical to SEQ ID NO: 466

SEQ ID NO: 2583 - DNA, 60 bp, Homo sapiens; identical to SEQ ID NO: 467

SEQ ID NO: 2584 - DNA, 60 bp, Homo sapiens; identical to SEQ ID NO: 468

SEQ ID NO: 2585 - DNA, 60 bp, Homo sapiens; identical to SEQ ID NO: 469

SEQ ID NO: 2586 - DNA, 60 bp, Homo sapiens; identical to SEQ ID NO: 470

SEQ ID NO: 2587 - DNA, 60 bp, Homo sapiens; identical to SEQ ID NO: 471

SEQ ID NO: 2588 - DNA, 60 bp, Homo sapiens; identical to SEQ ID NO: 472

SEQ ID NO: 2589 - DNA, 60 bp, Homo sapiens; identical to SEQ ID NO: 473

SEQ ID NO: 2590 - DNA, 60 bp, Homo sapiens; identical to SEQ ID NO: 474

SEQ ID NO: 2591 - DNA, 60 bp, Homo sapiens; identical to SEQ ID NO: 475

SEQ ID NO: 2592 - DNA, 60 bp, Homo sapiens; identical to SEQ ID NO: 476

SEQ ID NO: 2593 - DNA, 60 bp, Homo sapiens; identical to SEQ ID NO: 477

SEQ ID NO: 2594 - DNA, 60 bp, Homo sapiens; identical to SEQ ID NO: 478

SEQ ID NO: 2595 - DNA, 60 bp, Homo sapiens; identical to SEQ ID NO: 479

SEQ ID NO: 2596 - DNA, 60 bp, Homo sapiens; identical to SEQ ID NO: 480

SEQ ID NO: 2597 - DNA, 60 bp, Homo sapiens; identical to SEQ ID NO: 721

SEQ ID NO: 2598 - DNA, 60 bp, Homo sapiens; identical to SEQ ID NO: 722

SEQ ID NO: 2599 - DNA, 60 bp, Homo sapiens; identical to SEQ ID NO: 723

SEQ ID NO: 2600 - DNA, 60 bp, Homo sapiens; identical to SEQ ID NO: 724

SEQ ID NO: 2601 - DNA, 60 bp, Homo sapiens; identical to SEQ ID NO: 725

SEQ ID NO: 2602 - DNA, 60 bp, Homo sapiens; identical to SEQ ID NO: 726

SEQ ID NO: 2603 - DNA, 60 bp, Homo sapiens; identical to SEQ ID NO: 727

SEQ ID NO: 2604 - DNA, 60 bp, Homo sapiens; identical to SEQ ID NO: 728

SEQ ID NO: 2605 - DNA, 60 bp, Homo sapiens; identical to SEQ ID NO: 729

SEQ ID NO: 2606 - DNA, 60 bp, Homo sapiens; identical to SEQ ID NO: 730

SEQ ID NO: 2607 - DNA, 24 bp, Homo sapiens
ccctgctacagatgatgctgcctg

SEQ ID NO: 2608 - DNA, 23 bp, Homo sapiens
cagggtctgtcccatctgcctaa

SEQ ID NO: 2609 - DNA, 24 bp, Homo sapiens
ctgctcctatagggcgtaatgaca

SEQ ID NO: 2610 - DNA, 24 bp, Homo sapiens
cttcttgttgggacggctttcgtt

SEQ ID NO: 2611 - DNA, 23 bp, Homo sapiens
ccacatatcacgtggtacaaggt

SEQ ID NO: 2612 - DNA, 25 bp, Homo sapiens
agacgttctctttccatttggatca

SEQ ID NO: 2613 - DNA, 24 bp, Homo sapiens
attcgtgtccgcgggcaccttgaa

SEQ ID NO: 2614 - DNA, 25 bp, Homo sapiens
ttcggaccgcttccgtggccgtgag

SEQ ID NO: 2615 - DNA, 24 bp, Homo sapiens
cctggcaaagccttgggatacagc

SEQ ID NO: 2616 - DNA, 23 bp, Homo sapiens
gccatcccctacacaggttctca

SEQ ID NO: 2617 - DNA, 24 bp, Homo sapiens
catcaccggccggtgctaaaacca

SEQ ID NO: 2618 - DNA, 25 bp, Homo sapiens
cgcagcttcagttacgggggcgaat

SEQ ID NO: 2619 - DNA, 24 bp, Homo sapiens
aagttgtggcccatactcgtttac

SEQ ID NO: 2620 - DNA, 23 bp, Homo sapiens
gtaactccaccacagagtacgac

SEQ ID NO: 2621 - DNA, 25 bp, Homo sapiens
gggtgacctgggcggaggctgccct

SEQ ID NO: 2622 - DNA, 24 bp, Homo sapiens
atttgcgatggaacttggagtcta

SEQ ID NO: 2623 - DNA, 25 bp, Homo sapiens
cgttgacgcaatataggagaggaaa

SEQ ID NO: 2624 - DNA, 23 bp, Homo sapiens
gagggtttcctaacgtgccttgc

SEQ ID NO: 2625 - DNA, 23 bp, Homo sapiens
ctggtatagagattttgcaggta

SEQ ID NO: 2626 - DNA, 23 bp, Homo sapiens
tgtagctacctgacaggaactga

SEQ ID NO: 2627 - DNA, 24 bp, Homo sapiens
gatgctgctgggcagtcaccctcc

SEQ ID NO: 2628 - DNA, 23 bp, Homo sapiens
tcctcggtcgtagcccttatatt

SEQ ID NO: 2629 - DNA, 24 bp, Homo sapiens
acaccccacgatacaaaaacaagt

SEQ ID NO: 2630 - DNA, 24 bp, Homo sapiens
gctcagtacgattgacgtttgctc

SEQ ID NO: 2631 - DNA, 25 bp, Homo sapiens
accgcacaatcttaggggatacttc

SEQ ID NO: 2632 - DNA, 23 bp, Homo sapiens
cggtttgtaacggtgcggatacc

SEQ ID NO: 2633 - DNA, 23 bp, Homo sapiens
gttgctctaggacaccgagcaaa

SEQ ID NO: 2634 - DNA, 24 bp, Homo sapiens
gacaactccatctgcttcttccgt

SEQ ID NO: 2635 - DNA, 25 bp, Homo sapiens
ttgacaacgggccgttgggagcaaa

SEQ ID NO: 2636 - DNA, 25 bp, Homo sapiens
cgtggcaaacatgaaacaagctcca

SEQ ID NO: 2637 - DNA, 23 bp, Homo sapiens
ccccaccgagacacttgtgactc

SEQ ID NO: 2638 - DNA, 23 bp, Homo sapiens
tctggactctgccttcttggagc

SEQ ID NO: 2639 - DNA, 23 bp, Homo sapiens
agatttcaagtccgtaggctcag

SEQ ID NO: 2640 - DNA, 24 bp, Homo sapiens
cgtattccgggtcctgtcggtagg

SEQ ID NO: 2641 - DNA, 24 bp, Homo sapiens
ctttaaagactgcactactagtca

SEQ ID NO: 2642 - DNA, 23 bp, Homo sapiens
ttctagcctacccttaagcttgt

SEQ ID NO: 2643 - DNA, 25 bp, Homo sapiens
tgtatccatggtatctgtacgtttg

SEQ ID NO: 2644 - DNA, 24 bp, Homo sapiens
gtgtgcgtactcgttgaaggtggg

SEQ ID NO: 2645 - DNA, 24 bp, Homo sapiens
tatcagaagcccccgaaactaggt

SEQ ID NO: 2646 - DNA, 23 bp, Homo sapiens
tgaggatcaacagacctctgtat

SEQ ID NO: 2647 - DNA, 25 bp, Homo sapiens
ccgcttgcgaccgtttagatgtttc

SEQ ID NO: 2648 - DNA, 25 bp, Homo sapiens
accgagggcagcaccgtgtaacttc

SEQ ID NO: 2649 - DNA, 23 bp, Homo sapiens
gaacagggctgttcgcgtgatac

SEQ ID NO: 2650 - DNA, 24 bp, Homo sapiens
aggacatctatggggatacatagg

SEQ ID NO: 2651 - DNA, 25 bp, Homo sapiens
tcgtaaacctagatagtcaaccatg

SEQ ID NO: 2652 - DNA, 24 bp, Homo sapiens
tatggaggtcaagtgctgtaattt

SEQ ID NO: 2653 - DNA, 25 bp, Homo sapiens
ctagtatttgtcacgtcctgtatga

SEQ ID NO: 2654 - DNA, 23 bp, Homo sapiens
attcacttggcgtccccgttgcg

SEQ ID NO: 2655 - DNA, 26 bp, Homo sapiens
cagttttgatttccttttctgacctc

SEQ ID NO: 2656 - DNA, 26 bp, Homo sapiens
gttctgtttcttgaccagtgtgttga

SEQ ID NO: 2657 - DNA, 23 bp, Homo sapiens
aaagatgtcgtgctactccatac

SEQ ID NO: 2658 - DNA, 25 bp, Homo sapiens
aggcctccacctaccgatacatgag

SEQ ID NO: 2659 - DNA, 25 bp, Homo sapiens
cgggagatctagtaaaggatgaaat

SEQ ID NO: 2660 - DNA, 24 bp, Homo sapiens
tgtcccctcccgcatgcaagcgat

SEQ ID NO: 2661 - DNA, 23 bp, Homo sapiens
aaatggggcgaaattacgctgcc

SEQ ID NO: 2662 - DNA, 25 bp, Homo sapiens
ataggaattcagaggctttaaggtg

SEQ ID NO: 2663 - DNA, 25 bp, Homo sapiens
tgctcgtcctacgagtggtagagtt

SEQ ID NO: 2664 - DNA, 24 bp, Homo sapiens
gtggcgcgtttttaaacaccgtcc

SEQ ID NO: 2665 - DNA, 24 bp, Homo sapiens
cgtgtaaccccgacccagcaacgt

SEQ ID NO: 2666 - DNA, 25 bp, Homo sapiens
cagtcggcctaccgtccgctcccaa

SEQ ID NO: 2667 - DNA, 23 bp, Homo sapiens
tatttagcaggagtcgcactcag

SEQ ID NO: 2668 - DNA, 23 bp, Homo sapiens
tatgttactgtcagaggggcaca

SEQ ID NO: 2669 - DNA, 24 bp, Homo sapiens
ggttaatgatgggttcagctctaa

SEQ ID NO: 2670 - DNA, 24 bp, Homo sapiens
taataatatacggggcatagtata

SEQ ID NO: 2671 - DNA, 26 bp, Homo sapiens
cttgacagccctctttgtggttactc

SEQ ID NO: 2672 - DNA, 26 bp, Homo sapiens
gaatgacgccgaaggactttgtatcc

SEQ ID NO: 2673 - DNA, 25 bp, Homo sapiens
tagtctgttacgctggcctctatat

SEQ ID NO: 2674 - DNA, 25 bp, Homo sapiens
tgacttctagcgcacgacgtcctga

SEQ ID NO: 2675 - DNA, 25 bp, Homo sapiens
gaagtattcgcatgcgcaaccccac

SEQ ID NO: 2676 - DNA, 25 bp, Homo sapiens
ccaccccattccgcctatacggatg

SEQ ID NO: 2677 - DNA, 25 bp, Homo sapiens
agccaagcgtggttgtacttcgcca

SEQ ID NO: 2678 - DNA, 23 bp, Homo sapiens
gttcccatacctatcccgaatgc

SEQ ID NO: 2679 - DNA, 24 bp, Homo sapiens
acctgtccttgtggtttgcctaac

SEQ ID NO: 2680 - DNA, 25 bp, Homo sapiens
taagtaagggagttacaggctttca

SEQ ID NO: 2681 - DNA, 24 bp, Homo sapiens
agtacctgcagtttagtattaact

SEQ ID NO: 2682 - DNA, 25 bp, Homo sapiens
taatcttaaagtgatgcaggtacat

SEQ ID NO: 2683 - DNA, 24 bp, Homo sapiens
cgaatgctacgccgttacctcagc

SEQ ID NO: 2684 - DNA, 24 bp, Homo sapiens
catcgtggagtgtttaacactacc

SEQ ID NO: 2685 - DNA, 25 bp, Homo sapiens
ttggtacatgcagcaaacactcagt

SEQ ID NO: 2686 - DNA, 25 bp, Homo sapiens
tcctggtgtctcgtgcacaccctgg

SEQ ID NO: 2687 - DNA, 24 bp, Homo sapiens
aaagcggggtgtcaagcgggggcc

SEQ ID NO: 2688 - DNA, 25 bp, Homo sapiens
agccgtagtacctgcggcaggcaca

SEQ ID NO: 2689 - DNA, 25 bp, Homo sapiens
caagttatgcgcggcatctaatttt

SEQ ID NO: 2690 - DNA, 23 bp, Homo sapiens
tcactatccatatacgaggtggc

SEQ ID NO: 2691 - DNA, 23 bp, Homo sapiens
gtgtattgccgactgcccttgtc

SEQ ID NO: 2692 - DNA, 23 bp, Homo sapiens
gatgttccgtttggtctatagca

SEQ ID NO: 2693 - DNA, 24 bp, Homo sapiens
aatggtggagaaggacggaaacca

SEQ ID NO: 2694 - DNA, 25 bp, Homo sapiens
gtgtgttgtctctcatttctgctta

SEQ ID NO: 2695 - DNA, 25 bp, Homo sapiens
aattactattgactgcgagttcgct

SEQ ID NO: 2696 - DNA, 25 bp, Homo sapiens
accttggtggcgccccgtacgccgt

SEQ ID NO: 2697 - DNA, 23 bp, Homo sapiens
ctagtgacccgatgagttgccga

SEQ ID NO: 2698 - DNA, 23 bp, Homo sapiens
caggtagctgccctcacgggact

SEQ ID NO: 2699 - DNA, 23 bp, Homo sapiens
ttttaggtgcgtgatagactatg

SEQ ID NO: 2700 - DNA, 23 bp, Homo sapiens
gcactttacactggtatagggac

SEQ ID NO: 2701 - DNA, 24 bp, Homo sapiens
actagggtccttcagagccggtag

SEQ ID NO: 2702 - DNA, 24 bp, Homo sapiens
gtgtgtagccgagctaataaaacg

SEQ ID NO: 2703 - DNA, 23 bp, Homo sapiens
tgtatggcatacgtgtacgagct

SEQ ID NO: 2704 - DNA, 25 bp, Homo sapiens
tgcgtgctaacggaacgcttcaggc

SEQ ID NO: 2705 - DNA, 24 bp, Homo sapiens
ctgcaggaatcaaatcgcatccgc

SEQ ID NO: 2706 - DNA, 24 bp, Homo sapiens
atcgaaattatggtaccgagaggc

SEQ ID NO: 2707 - DNA, 60 bp, Homo sapiens; identical to SEQ ID NO: 731

SEQ ID NO: 2708 - DNA, 60 bp, Homo sapiens; identical to SEQ ID NO: 732

SEQ ID NO: 2709 - DNA, 60 bp, Homo sapiens; identical to SEQ ID NO: 733

SEQ ID NO: 2710 - DNA, 60 bp, Homo sapiens; identical to SEQ ID NO: 734

SEQ ID NO: 2711 - DNA, 60 bp, Homo sapiens; identical to SEQ ID NO: 735

SEQ ID NO: 2712 - DNA, 60 bp, Homo sapiens; identical to SEQ ID NO: 736

SEQ ID NO: 2713 - DNA, 60 bp, Homo sapiens; identical to SEQ ID NO: 737

SEQ ID NO: 2714 - DNA, 60 bp, Homo sapiens; identical to SEQ ID NO: 738

SEQ ID NO: 2715 - DNA, 60 bp, Homo sapiens; identical to SEQ ID NO: 739

SEQ ID NO: 2716 - DNA, 60 bp, Homo sapiens; identical to SEQ ID NO: 740

SEQ ID NO: 2717 - DNA, 60 bp, Homo sapiens; identical to SEQ ID NO: 741

SEQ ID NO: 2718 - DNA, 60 bp, Homo sapiens; identical to SEQ ID NO: 742

SEQ ID NO: 2719 - DNA, 60 bp, Homo sapiens; identical to SEQ ID NO: 743

SEQ ID NO: 2720 - DNA, 60 bp, Homo sapiens; identical to SEQ ID NO: 744

SEQ ID NO: 2721 - DNA, 60 bp, Homo sapiens; identical to SEQ ID NO: 745

SEQ ID NO: 2722 - DNA, 60 bp, Homo sapiens; identical to SEQ ID NO: 746

SEQ ID NO: 2723 - DNA, 60 bp, Homo sapiens; identical to SEQ ID NO: 747

SEQ ID NO: 2724 - DNA, 60 bp, Homo sapiens; identical to SEQ ID NO: 748

SEQ ID NO: 2725 - DNA, 60 bp, Homo sapiens; identical to SEQ ID NO: 749

SEQ ID NO: 2726 - DNA, 60 bp, Homo sapiens; identical to SEQ ID NO: 750

SEQ ID NO: 2727 - DNA, 60 bp, Homo sapiens; identical to SEQ ID NO: 751

SEQ ID NO: 2728 - DNA, 60 bp, Homo sapiens; identical to SEQ ID NO: 752

SEQ ID NO: 2729 - DNA, 60 bp, Homo sapiens; identical to SEQ ID NO: 753

SEQ ID NO: 2730 - DNA, 60 bp, Homo sapiens; identical to SEQ ID NO: 754

SEQ ID NO: 2731 - DNA, 60 bp, Homo sapiens; identical to SEQ ID NO: 755

SEQ ID NO: 2732 - DNA, 60 bp, Homo sapiens; identical to SEQ ID NO: 756

SEQ ID NO: 2733 - DNA, 60 bp, Homo sapiens; identical to SEQ ID NO: 757

SEQ ID NO: 2734 - DNA, 60 bp, Homo sapiens; identical to SEQ ID NO: 758

SEQ ID NO: 2735 - DNA, 60 bp, Homo sapiens; identical to SEQ ID NO: 759

SEQ ID NO: 2736 - DNA, 60 bp, Homo sapiens; identical to SEQ ID NO: 760

SEQ ID NO: 2737 - DNA, 60 bp, Homo sapiens; identical to SEQ ID NO: 761

SEQ ID NO: 2738 - DNA, 60 bp, Homo sapiens; identical to SEQ ID NO: 762

SEQ ID NO: 2739 - DNA, 60 bp, Homo sapiens; identical to SEQ ID NO: 763

SEQ ID NO: 2740 - DNA, 60 bp, Homo sapiens; identical to SEQ ID NO: 764

SEQ ID NO: 2741 - DNA, 60 bp, Homo sapiens; identical to SEQ ID NO: 765

SEQ ID NO: 2742 - DNA, 60 bp, Homo sapiens; identical to SEQ ID NO: 766

SEQ ID NO: 2743 - DNA, 60 bp, Homo sapiens; identical to SEQ ID NO: 767

SEQ ID NO: 2744 - DNA, 60 bp, Homo sapiens; identical to SEQ ID NO: 768

SEQ ID NO: 2745 - DNA, 60 bp, Homo sapiens; identical to SEQ ID NO: 769

SEQ ID NO: 2746 - DNA, 60 bp, Homo sapiens; identical to SEQ ID NO: 770

SEQ ID NO: 2747 - DNA, 60 bp, Homo sapiens; identical to SEQ ID NO: 771

SEQ ID NO: 2748 - DNA, 60 bp, Homo sapiens; identical to SEQ ID NO: 772

SEQ ID NO: 2749 - DNA, 60 bp, Homo sapiens; identical to SEQ ID NO: 773

SEQ ID NO: 2750 - DNA, 60 bp, Homo sapiens; identical to SEQ ID NO: 774

SEQ ID NO: 2751 - DNA, 60 bp, Homo sapiens; identical to SEQ ID NO: 775

SEQ ID NO: 2752 - DNA, 60 bp, Homo sapiens; identical to SEQ ID NO: 776

SEQ ID NO: 2753 - DNA, 60 bp, Homo sapiens; identical to SEQ ID NO: 777

SEQ ID NO: 2754 - DNA, 60 bp, Homo sapiens; identical to SEQ ID NO: 778

SEQ ID NO: 2755 - DNA, 60 bp, Homo sapiens; identical to SEQ ID NO: 779

SEQ ID NO: 2756 - DNA, 60 bp, Homo sapiens; identical to SEQ ID NO: 780

SEQ ID NO: 2757 - DNA, 24 bp, Homo sapiens
gtgcacatgagatcgggcacagat

SEQ ID NO: 2758 - DNA, 24 bp, Homo sapiens
agcaccaggcattcgtttcataac

SEQ ID NO: 2759 - DNA, 23 bp, Homo sapiens
ccccgctacctaagaggctaagg

SEQ ID NO: 2760 - DNA, 23 bp, Homo sapiens
gctgcctaagggtctctttggtc

SEQ ID NO: 2761 - DNA, 25 bp, Homo sapiens
ggtgatgccccaaacagtttgttat

SEQ ID NO: 2762 - DNA, 23 bp, Homo sapiens
gaacagtcgggctttctagggcg

SEQ ID NO: 2763 - DNA, 26 bp, Homo sapiens
ctcagtctccaaagaatccgaaagta

SEQ ID NO: 2764 - DNA, 26 bp, Homo sapiens
ggctgcctaagggtctctttggtcta

SEQ ID NO: 2765 - DNA, 23 bp, Homo sapiens
gaggagagtggcagaaggaccaa

SEQ ID NO: 2766 - DNA, 23 bp, Homo sapiens
cctggctgtcatccaaccaccac

SEQ ID NO: 2767 - DNA, 23 bp, Homo sapiens
gcctcacagagcctcatttccac

SEQ ID NO: 2768 - DNA, 23 bp, Homo sapiens
tagtggattcctggctgggcacg

SEQ ID NO: 2769 - DNA, 25 bp, Homo sapiens
aatcctttaacggtcctcgtgcgat

SEQ ID NO: 2770 - DNA, 25 bp, Homo sapiens
acttatacccacgtacccaacatgt

SEQ ID NO: 2771 - DNA, 24 bp, Homo sapiens
ctccagaagccgtcttatgtgggc

SEQ ID NO: 2772 - DNA, 25 bp, Homo sapiens
gatgtcgatgagcaaaagtgggtgg

SEQ ID NO: 2773 - DNA, 23 bp, Homo sapiens
acgcgacgttactctgatggcaa

SEQ ID NO: 2774 - DNA, 25 bp, Homo sapiens
gctcgggaactgcctggacgccctc

SEQ ID NO: 2775 - DNA, 24 bp, Homo sapiens
gtattcatcatgataatgcgtagg

SEQ ID NO: 2776 - DNA, 25 bp, Homo sapiens
cgtgtatacataaagactgtacggt

SEQ ID NO: 2777 - DNA, 24 bp, Homo sapiens
gcactaccagttgccgttacacta

SEQ ID NO: 2778 - DNA, 23 bp, Homo sapiens
catttacactggggtgagatacg

SEQ ID NO: 2779 - DNA, 23 bp, Homo sapiens
gccttgcgagggccatcctattt

SEQ ID NO: 2780 - DNA, 24 bp, Homo sapiens
tgagaggaaaaatatatcgttagt

SEQ ID NO: 2781 - DNA, 24 bp, Homo sapiens
ctcggtgggttaaatatgatttgg

SEQ ID NO: 2782 - DNA, 25 bp, Homo sapiens
aagaacttagttttgagattatccc

SEQ ID NO: 2783 - DNA, 23 bp, Homo sapiens
ggacgagacgcgcatggggtgac

SEQ ID NO: 2784 - DNA, 25 bp, Homo sapiens
gcgtaagttcaactatgattctatt

SEQ ID NO: 2785 - DNA, 23 bp, Homo sapiens
gccccacctggtccacagaaatc

SEQ ID NO: 2786 - DNA, 23 bp, Homo sapiens
gcggaacttcaaaggtcaggtgc

SEQ ID NO: 2787 - DNA, 25 bp, Homo sapiens
cagcctgtcctgcaatgaggaatat

SEQ ID NO: 2788 - DNA, 24 bp, Homo sapiens
atctacgagctgccctccctatac

SEQ ID NO: 2789 - DNA, 25 bp, Homo sapiens
acagaattcgaaacatctggggatt

SEQ ID NO: 2790 - DNA, 25 bp, Homo sapiens
cgcagggccgtaagttacgctcaga

SEQ ID NO: 2791 - DNA, 23 bp, Homo sapiens
tttatgacttacatctctatagg

SEQ ID NO: 2792 - DNA, 25 bp, Homo sapiens
tcaactgcccttgggagaccaatgc

SEQ ID NO: 2793 - DNA, 24 bp, Homo sapiens
atacaactaggactagggcgcacg

SEQ ID NO: 2794 - DNA, 24 bp, Homo sapiens
aacctccatgtgttcggctaaaag

SEQ ID NO: 2795 - DNA, 24 bp, Homo sapiens
ttaggcccgtatgtacagtcaccg

SEQ ID NO: 2796 - DNA, 24 bp, Homo sapiens
ccatgcatttcttaatcctttgtc

SEQ ID NO: 2797 - DNA, 24 bp, Homo sapiens
cttgagctcggagaaattacagtc

SEQ ID NO: 2798 - DNA, 23 bp, Homo sapiens
ccgaaattgtttatgacttagta

SEQ ID NO: 2799 - DNA, 25 bp, Homo sapiens
cagtgacaaattcttgccacgcggt

SEQ ID NO: 2800 - DNA, 23 bp, Homo sapiens
caccctccaaaagagcagcagat

SEQ ID NO: 2801 - DNA, 23 bp, Homo sapiens
cgagagtccaattcacttgttag

SEQ ID NO: 2802 - DNA, 24 bp, Homo sapiens
tttgggcgtagctgtgtcgagtgc

SEQ ID NO: 2803 - DNA, 23 bp, Homo sapiens
ccgcagcaactacactcagcctt

SEQ ID NO: 2804 - DNA, 23 bp, Homo sapiens
ataatggactgggctgggcgtgg

SEQ ID NO: 2805 - DNA, 25 bp, Homo sapiens
atagggccgtgtagaggatctcaaa

SEQ ID NO: 2806 - DNA, 23 bp, Homo sapiens
ccgtctcgctgtactaactcgca

SEQ ID NO: 2807 - DNA, 25 bp, Homo sapiens
aaaaaggaaacagccgtcgccttga

SEQ ID NO: 2808 - DNA, 24 bp, Homo sapiens
tcaagcgagcacgttttttgcagt

SEQ ID NO: 2809 - DNA, 23 bp, Homo sapiens
gccgagaacattcaccgctttcc

SEQ ID NO: 2810 - DNA, 23 bp, Homo sapiens
taccagctcgaggtgttaatacc

SEQ ID NO: 2811 - DNA, 25 bp, Homo sapiens
aagtcaatgcgtcgatgacgtgggt

SEQ ID NO: 2812 - DNA, 25 bp, Homo sapiens
attgcagaaacgtcacgtcctggcc

SEQ ID NO: 2813 - DNA, 26 bp, Homo sapiens
cgcaccacattttatttcctacagtc

SEQ ID NO: 2814 - DNA, 26 bp, Homo sapiens
tgtgactgtgctaccaccaactacgg

SEQ ID NO: 2815 - DNA, 25 bp, Homo sapiens
cccgggcccacttgtttttacccat

SEQ ID NO: 2816 - DNA, 24 bp, Homo sapiens
tcgaatatcgagctccatcaggct

SEQ ID NO: 2817 - DNA, 25 bp, Homo sapiens
aagcacattaggctcaatgtgtaca

SEQ ID NO: 2818 - DNA, 25 bp, Homo sapiens
cgcagtatgcaacgcttgcggaccg

SEQ ID NO: 2819 - DNA, 26 bp, Homo sapiens
caatgagggcagaggaatagaggaat

SEQ ID NO: 2820 - DNA, 26 bp, Homo sapiens
tgagatgatgggcaccagggtaatgg

SEQ ID NO: 2821 - DNA, 25 bp, Homo sapiens
cattcctgggattattaggcgtggc

SEQ ID NO: 2822 - DNA, 25 bp, Homo sapiens
cgtccgcagacatgtctcttcggta

SEQ ID NO: 2823 - DNA, 26 bp, Homo sapiens
gttgtcccagccctaagtagatgata

SEQ ID NO: 2824 - DNA, 26 bp, Homo sapiens
agtgctgtgacattggtggtagtggc

SEQ ID NO: 2825 - DNA, 23 bp, Homo sapiens
taagctttctaggagtcatcaag

SEQ ID NO: 2826 - DNA, 24 bp, Homo sapiens
cggccctatcctgagattggtatt

SEQ ID NO: 2827 - DNA, 23 bp, Homo sapiens
ccacggcatttactgtgctccag

SEQ ID NO: 2828 - DNA, 23 bp, Homo sapiens
aaagcaggaactggctgggcgtg

SEQ ID NO: 2829 - DNA, 23 bp, Homo sapiens
gatagttctttagtagcgcactc

SEQ ID NO: 2830 - DNA, 25 bp, Homo sapiens
acacacgtcgttgtatcatcaatgt

SEQ ID NO: 2831 - DNA, 23 bp, Homo sapiens
ttattcgctcagcgtcatcgaaa

SEQ ID NO: 2832 - DNA, 25 bp, Homo sapiens
gtcttcatagcgaggactacgctga

SEQ ID NO: 2833 - DNA, 25 bp, Homo sapiens
ccgttcagacggctagactcagcag

SEQ ID NO: 2834 - DNA, 24 bp, Homo sapiens
tgtttaaaaaggtgcccgagtgcg

SEQ ID NO: 2835 - DNA, 24 bp, Homo sapiens
aaaactgacgggtcgaactctgct

SEQ ID NO: 2836 - DNA, 24 bp, Homo sapiens
atgctaccaagagcctaatgggat

SEQ ID NO: 2837 - DNA, 25 bp, Homo sapiens
tcctgctctcgtccatggtattcgc

SEQ ID NO: 2838 - DNA, 24 bp, Homo sapiens
gcaggaatacttgtgggtgcgcac

SEQ ID NO: 2839 - DNA, 23 bp, Homo sapiens
aggtcacctaagaagggttgcat

SEQ ID NO: 2840 - DNA, 24 bp, Homo sapiens
cctgcaccggttatatgaactaca

SEQ ID NO: 2841 - DNA, 25 bp, Homo sapiens
tgaaaagagtgctcctgcgataaat

SEQ ID NO: 2842 - DNA, 23 bp, Homo sapiens
agagagcctttagaaacacaccg

SEQ ID NO: 2843 - DNA, 25 bp, Homo sapiens
gttctctatgcgcaggtccccttcg

SEQ ID NO: 2844 - DNA, 25 bp, Homo sapiens
ctgtaaggaagttagtcaagacgta

SEQ ID NO: 2845 - DNA, 26 bp, Homo sapiens
cttctctatcttccacaacctcacca

SEQ ID NO: 2846 - DNA, 26 bp, Homo sapiens
taaatgggagcagccacagtgaggac

SEQ ID NO: 2847 - DNA, 25 bp, Homo sapiens
ttgaatcgtagaataccagtagttt

SEQ ID NO: 2848 - DNA, 25 bp, Homo sapiens
gggtccatgcgaagggtggcagacc

SEQ ID NO: 2849 - DNA, 23 bp, Homo sapiens
gtgtttaccaatgttccaccccc

SEQ ID NO: 2850 - DNA, 24 bp, Homo sapiens
gttttataaagtgaggacggaccg

SEQ ID NO: 2851 - DNA, 23 bp, Homo sapiens
cgcgccttttgggaagctcacgt

SEQ ID NO: 2852 - DNA, 23 bp, Homo sapiens
gtagtggccaccctcttcaagct

SEQ ID NO: 2853 - DNA, 26 bp, Homo sapiens
aatacctacccttgcccttcccacca

SEQ ID NO: 2854 - DNA, 26 bp, Homo sapiens
aatctctctcggtgttttagccgtca

SEQ ID NO: 2855 - DNA, 24 bp, Homo sapiens
agtgccttcaagacccccaagatc

SEQ ID NO: 2856 - DNA, 23 bp, Homo sapiens
ggaaagtgagtatattgctaggg

SEQ ID NO: 2857 - DNA, 60 bp, Homo sapiens; identical to SEQ ID NO: 781

SEQ ID NO: 2858 - DNA, 60 bp, Homo sapiens; identical to SEQ ID NO: 782

SEQ ID NO: 2859 - DNA, 60 bp, Homo sapiens; identical to SEQ ID NO: 783

SEQ ID NO: 2860 - DNA, 60 bp, Homo sapiens; identical to SEQ ID NO: 784

SEQ ID NO: 2861 - DNA, 60 bp, Homo sapiens; identical to SEQ ID NO: 785

SEQ ID NO: 2862 - DNA, 60 bp, Homo sapiens; identical to SEQ ID NO: 786

SEQ ID NO: 2863 - DNA, 60 bp, Homo sapiens; identical to SEQ ID NO: 787

SEQ ID NO: 2864 - DNA, 60 bp, Homo sapiens; identical to SEQ ID NO: 788

SEQ ID NO: 2865 - DNA, 60 bp, Homo sapiens; identical to SEQ ID NO: 789

SEQ ID NO: 2866 - DNA, 60 bp, Homo sapiens; identical to SEQ ID NO: 790

SEQ ID NO: 2867 - DNA, 60 bp, Homo sapiens; identical to SEQ ID NO: 791

SEQ ID NO: 2868 - DNA, 60 bp, Homo sapiens; identical to SEQ ID NO: 792

SEQ ID NO: 2869 - DNA, 60 bp, Homo sapiens; identical to SEQ ID NO: 793

SEQ ID NO: 2870 - DNA, 60 bp, Homo sapiens; identical to SEQ ID NO: 794

SEQ ID NO: 2871 - DNA, 60 bp, Homo sapiens; identical to SEQ ID NO: 795

SEQ ID NO: 2872 - DNA, 60 bp, Homo sapiens; identical to SEQ ID NO: 796

SEQ ID NO: 2873 - DNA, 60 bp, Homo sapiens; identical to SEQ ID NO: 797

SEQ ID NO: 2874 - DNA, 60 bp, Homo sapiens; identical to SEQ ID NO: 798

SEQ ID NO: 2875 - DNA, 60 bp, Homo sapiens; identical to SEQ ID NO: 799

SEQ ID NO: 2876 - DNA, 60 bp, Homo sapiens; identical to SEQ ID NO: 800

SEQ ID NO: 2877 - DNA, 60 bp, Homo sapiens; identical to SEQ ID NO: 801

SEQ ID NO: 2878 - DNA, 60 bp, Homo sapiens; identical to SEQ ID NO: 802

SEQ ID NO: 2879 - DNA, 60 bp, Homo sapiens; identical to SEQ ID NO: 803

SEQ ID NO: 2880 - DNA, 60 bp, Homo sapiens; identical to SEQ ID NO: 804

SEQ ID NO: 2881 - DNA, 60 bp, Homo sapiens; identical to SEQ ID NO: 805

SEQ ID NO: 2882 - DNA, 60 bp, Homo sapiens; identical to SEQ ID NO: 806

SEQ ID NO: 2883 - DNA, 60 bp, Homo sapiens; identical to SEQ ID NO: 807

SEQ ID NO: 2884 - DNA, 60 bp, Homo sapiens; identical to SEQ ID NO: 808

SEQ ID NO: 2885 - DNA, 60 bp, Homo sapiens; identical to SEQ ID NO: 809

SEQ ID NO: 2886 - DNA, 60 bp, Homo sapiens; identical to SEQ ID NO: 810

SEQ ID NO: 2887 - DNA, 60 bp, Homo sapiens; identical to SEQ ID NO: 811

SEQ ID NO: 2888 - DNA, 60 bp, Homo sapiens; identical to SEQ ID NO: 812

SEQ ID NO: 2889 - DNA, 60 bp, Homo sapiens; identical to SEQ ID NO: 813

SEQ ID NO: 2890 - DNA, 60 bp, Homo sapiens; identical to SEQ ID NO: 814

SEQ ID NO: 2891 - DNA, 60 bp, Homo sapiens; identical to SEQ ID NO: 815

SEQ ID NO: 2892 - DNA, 60 bp, Homo sapiens; identical to SEQ ID NO: 816

SEQ ID NO: 2893 - DNA, 60 bp, Homo sapiens; identical to SEQ ID NO: 817

SEQ ID NO: 2894 - DNA, 60 bp, Homo sapiens; identical to SEQ ID NO: 818

SEQ ID NO: 2895 - DNA, 60 bp, Homo sapiens; identical to SEQ ID NO: 819

SEQ ID NO: 2896 - DNA, 60 bp, Homo sapiens; identical to SEQ ID NO: 820

SEQ ID NO: 2897 - DNA, 26 bp, Homo sapiens
ccaccaacaccactttcaaacccgca

SEQ ID NO: 2898 - DNA, 26 bp, Homo sapiens
caaactacatcctgtgagccaaacta

SEQ ID NO: 2899 - DNA, 23 bp, Homo sapiens
aattctcacgggcaaagcagatg

SEQ ID NO: 2900 - DNA, 24 bp, Homo sapiens
atggcgagtcgcgctttccgtaat

SEQ ID NO: 2901 - DNA, 23 bp, Homo sapiens
ccctgaggtagcacaacagaacc

SEQ ID NO: 2902 - DNA, 23 bp, Homo sapiens
tagtggattcctggctgggcacg

SEQ ID NO: 2903 - DNA, 23 bp, Homo sapiens
cccctaacttcctcttctcaccc

SEQ ID NO: 2904 - DNA, 23 bp, Homo sapiens
gatagtgagcccagagcagtggc

SEQ ID NO: 2905 - DNA, 25 bp, Homo sapiens
cttgcccgctcctggacaggtggtc

SEQ ID NO: 2906 - DNA, 24 bp, Homo sapiens
tacgatgtgacagagccggtcccg

SEQ ID NO: 2907 - DNA, 24 bp, Homo sapiens
ttaaaaagacgaacactctgggtt

SEQ ID NO: 2908 - DNA, 25 bp, Homo sapiens
tttattttagcgtctagggcctgag

SEQ ID NO: 2909 - DNA, 23 bp, Homo sapiens
taaaaatctgtcaagccagttag

SEQ ID NO: 2910 - DNA, 23 bp, Homo sapiens
ttcatccaagctccaagctacga

SEQ ID NO: 2911 - DNA, 24 bp, Homo sapiens
agcgtacacgagcgacaacgacgc

SEQ ID NO: 2912 - DNA, 24 bp, Homo sapiens
taaagacttagagttccggcccac

SEQ ID NO: 2913 - DNA, 23 bp, Homo sapiens
cctctgacgcaatgagccgcaag

SEQ ID NO: 2914 - DNA, 23 bp, Homo sapiens
ctgtatactgccacacattagag

SEQ ID NO: 2915 - DNA, 23 bp, Homo sapiens
ctccgtgagtcctcttagcccct

SEQ ID NO: 2916 - DNA, 23 bp, Homo sapiens
caagccaaggttcaagccctgac

SEQ ID NO: 2917 - DNA, 25 bp, Homo sapiens
aaatcgggccctactgctactggca

SEQ ID NO: 2918 - DNA, 24 bp, Homo sapiens
gcgtcacccggctccgaaaatatg

SEQ ID NO: 2919 - DNA, 25 bp, Homo sapiens
tctcctatacacttgtgtaccctag

SEQ ID NO: 2920 - DNA, 23 bp, Homo sapiens
cgatgctctctatggttcaatcc

SEQ ID NO: 2921 - DNA, 23 bp, Homo sapiens
gtataagaagatgcgtcggtgct

SEQ ID NO: 2922 - DNA, 24 bp, Homo sapiens
tcgacaaccagtatggtgattcct

SEQ ID NO: 2923 - DNA, 23 bp, Homo sapiens
ttcggccttgcaggctggcacac

SEQ ID NO: 2924 - DNA, 24 bp, Homo sapiens
atcccctagtcgagatgcatgtga

SEQ ID NO: 2925 - DNA, 25 bp, Homo sapiens
aaggagttccaccctccgaaggatc

SEQ ID NO: 2926 - DNA, 25 bp, Homo sapiens
cgattttcgggcgaaggggtttgta

SEQ ID NO: 2927 - DNA, 24 bp, Homo sapiens
gaacacggagaggtatcccgcccg

SEQ ID NO: 2928 - DNA, 24 bp, Homo sapiens
aggacactgtgtaacgtaactgta

SEQ ID NO: 2929 - DNA, 24 bp, Homo sapiens
ttcatcgtaccgtatctgccgtta

SEQ ID NO: 2930 - DNA, 25 bp, Homo sapiens
gagtacagataattgtggagaacgt

SEQ ID NO: 2931 - DNA, 23 bp, Homo sapiens
tgagtccaacgcgtaggctagaa

SEQ ID NO: 2932 - DNA, 25 bp, Homo sapiens
ggtggctaggctgtcttgacccaat

SEQ ID NO: 2933 - DNA, 24 bp, Homo sapiens
tgtagacagtgtgcactagacact

SEQ ID NO: 2934 - DNA, 24 bp, Homo sapiens
gctttggcgcgtaaaggtaaccca

SEQ ID NO: 2935 - DNA, 25 bp, Homo sapiens
tgtgaaaaaactcccctcagccatc

SEQ ID NO: 2936 - DNA, 25 bp, Homo sapiens
cggacttcggttatgaagggtgaaa

SEQ ID NO: 2937 - DNA, 23 bp, Homo sapiens
tcggatggtgactggagcgttat

SEQ ID NO: 2938 - DNA, 23 bp, Homo sapiens
ggcactctcgtacaaaagcgttt

SEQ ID NO: 2939 - DNA, 24 bp, Homo sapiens
acaggatcccagccttagcggcct

SEQ ID NO: 2940 - DNA, 25 bp, Homo sapiens
tgcggtgcgtgtattcgcagtcgaa

SEQ ID NO: 2941 - DNA, 25 bp, Homo sapiens
aactggaatcccgcattgcggtagc

SEQ ID NO: 2942 - DNA, 23 bp, Homo sapiens
acacatgcacctcgagtggttct

SEQ ID NO: 2943 - DNA, 24 bp, Homo sapiens
gaaaactcgtggagttggtccgcg

SEQ ID NO: 2944 - DNA, 23 bp, Homo sapiens
aaccaactggctttctcggtcgg

SEQ ID NO: 2945 - DNA, 23 bp, Homo sapiens
tagcgaatacgagtgtaccgaac

SEQ ID NO: 2946 - DNA, 24 bp, Homo sapiens
ccaaccgtagttatcttcgtaaca

SEQ ID NO: 2947 - DNA, 23 bp, Homo sapiens
acaggaaccatgatcaattgacc

SEQ ID NO: 2948 - DNA, 23 bp, Homo sapiens
tctagttaccccaccagaaggac

SEQ ID NO: 2949 - DNA, 23 bp, Homo sapiens
gccgaacggattctgatcatagt

SEQ ID NO: 2950 - DNA, 24 bp, Homo sapiens
aacctgtcaaacgacgccacttcg

SEQ ID NO: 2951 - DNA, 23 bp, Homo sapiens
tctccatccctcctcctccagat

SEQ ID NO: 2952 - DNA, 23 bp, Homo sapiens
ttacgccaccacacttcagcccc

SEQ ID NO: 2953 - DNA, 23 bp, Homo sapiens
tgaagcaaagttctgacggctat

SEQ ID NO: 2954 - DNA, 25 bp, Homo sapiens
ccagttgagactctcggactacaac

SEQ ID NO: 2955 - DNA, 25 bp, Homo sapiens
cgcagtttccacggaactagattgc

SEQ ID NO: 2956 - DNA, 25 bp, Homo sapiens
gtcctaagtagaggattccaaggcg

SEQ ID NO: 2957 - DNA, 24 bp, Homo sapiens
ttcgtgtgcagaatagcggcatcg

SEQ ID NO: 2958 - DNA, 23 bp, Homo sapiens
tacgggctcgtcttaacgggaat

SEQ ID NO: 2959 - DNA, 25 bp, Homo sapiens
ctttggctgttttctcacatcgtgg

SEQ ID NO: 2960 - DNA, 25 bp, Homo sapiens
gttagtggggacacggcgaaccact

SEQ ID NO: 2961 - DNA, 23 bp, Homo sapiens
ctaactcgaacattagacgtgct

SEQ ID NO: 2962 - DNA, 24 bp, Homo sapiens
tgcagcgtcgatgcatgggtggtc

SEQ ID NO: 2963 - DNA, 25 bp, Homo sapiens
gtccgacatggttgaagttttccta

SEQ ID NO: 2964 - DNA, 23 bp, Homo sapiens
ctgtcgatcgtcgccgcaatggc

SEQ ID NO: 2965 - DNA, 25 bp, Homo sapiens
tccggtgagatggaggcattggtct

SEQ ID NO: 2966 - DNA, 23 bp, Homo sapiens
gacactgccaagatcagtctggc

SEQ ID NO: 2967 - DNA, 24 bp, Homo sapiens
cctcatgtatcgaggcagatgggg

SEQ ID NO: 2968 - DNA, 24 bp, Homo sapiens
ccacagattctttaaacataccct

SEQ ID NO: 2969 - DNA, 25 bp, Homo sapiens
actctagtacaagtcatctcgagcc

SEQ ID NO: 2970 - DNA, 23 bp, Homo sapiens
actattctatggcaagtgctgag

SEQ ID NO: 2971 - DNA, 25 bp, Homo sapiens
tcgcgtgatgaaccgcttcgagcgc

SEQ ID NO: 2972 - DNA, 23 bp, Homo sapiens
gtctgaatcttatgtggaaaccc

SEQ ID NO: 2973 - DNA, 25 bp, Homo sapiens
aaataaatgggcgtggtggcacata

SEQ ID NO: 2974 - DNA, 26 bp, Homo sapiens
gttctgtttcttgaccagtgtgttga

SEQ ID NO: 2975 - DNA, 26 bp, Homo sapiens
ctacatccagtatcttcagaaaacac

SEQ ID NO: 2976 - DNA, 26 bp, Homo sapiens
ccactcttgacctcagtttccctgta

SEQ ID NO: 2977 - DNA, 28 bp, Homo sapiens
ccactaaatggagcagttgtttgacctc

SEQ ID NO: 2978 - DNA, 23 bp, Homo sapiens
gtgcccactgcccacaggacgca

SEQ ID NO: 2979 - DNA, 28 bp, Homo sapiens
cacacttagggtctccttctatgtcccc

SEQ ID NO: 2980 - DNA, 28 bp, Homo sapiens
ggcgttgtgcggttttgagaatagttcc

SEQ ID NO: 2981 - DNA, 28 bp, Homo sapiens
cccacatagaagaatgaagttggacccc

SEQ ID NO: 2982 - DNA, 28 bp, Homo sapiens
gcgtgtatttctgattcttgccacctcc

SEQ ID NO: 2983 - DNA, 24 bp, Homo sapiens
cccctccgtgggacaggaacagtt

SEQ ID NO: 2984 - DNA, 26 bp, Homo sapiens
caagagcaagccacgggaggtagggc

SEQ ID NO: 2985 - DNA, 28 bp, Homo sapiens
ggtgaaaggaaggtgtgtgaagtgaacc

SEQ ID NO: 2986 - DNA, 27 bp, Homo sapiens
ggcagagaagccagagtgagccaagac

SEQ ID NO: 2987 - DNA, 28 bp, Homo sapiens
agaaagtcccaactctgaagaagtccta

SEQ ID NO: 2988 - DNA, 28 bp, Homo sapiens
aatcatcatctctggagcctctgaaagc

SEQ ID NO: 2989 - DNA, 28 bp, Homo sapiens
gtgttcattgtgagatgtgtgacttgac

SEQ ID NO: 2990 - DNA, 28 bp, Homo sapiens
ccactccttctctacaacttcaccagat

SEQ ID NO: 2991 - DNA, 28 bp, Homo sapiens
ggaagaagggacaggtcagagaggtgag

SEQ ID NO: 2992 - DNA, 28 bp, Homo sapiens
ccccatactcctctcccctgtggttcag

SEQ ID NO: 2993 - DNA, 25 bp, Homo sapiens
taagacctgtaaactgggagagccc

SEQ ID NO: 2994 - DNA, 28 bp, Homo sapiens
gccaataaaacaaataaaagcccctcac

SEQ ID NO: 2995 - DNA, 26 bp, Homo sapiens
gcacaccgccaaggaactcgcttagc

SEQ ID NO: 2996 - DNA, 28 bp, Homo sapiens
ggtcttattcattctgtgggttggctct

SEQ ID NO: 2997 - DNA, 23 bp, Homo sapiens
cggctccctccaggctctgctca

SEQ ID NO: 2998 - DNA, 28 bp, Homo sapiens
gcatccttctctcactgggtattccttt

SEQ ID NO: 2999 - DNA, 28 bp, Homo sapiens
cctgggttgctggtgtctgtgtttcctc

SEQ ID NO: 3000 - DNA, 28 bp, Homo sapiens
cttgcttagaaaaccatctgtgcctggg

SEQ ID NO: 3001 - DNA, 28 bp, Homo sapiens
gtagtagacgcattctgtggagttggag

SEQ ID NO: 3002 - DNA, 28 bp, Homo sapiens
taaacaggttcatccaggttgtgaggta

SEQ ID NO: 3003 - DNA, 28 bp, Homo sapiens
cagaccgatggaatggaaccgagagccc

SEQ ID NO: 3004 - DNA, 27 bp, Homo sapiens
ctgacgaggtgtctgctccattgcctg

SEQ ID NO: 3005 - DNA, 25 bp, Homo sapiens
catctgcttttgtatggttgtgagc

SEQ ID NO: 3006 - DNA, 27 bp, Homo sapiens
gcctgtgggatgactgtggttacctgc

SEQ ID NO: 3007 - DNA, 28 bp, Homo sapiens
ccaggcaatgctacgccaggctttgtgc

SEQ ID NO: 3008 - DNA, 28 bp, Homo sapiens
gggttcatcctcggtagagcggcaaagc

SEQ ID NO: 3009 - DNA, 28 bp, Homo sapiens
ctgtgaaggtgtggagagcacttaggga

SEQ ID NO: 3010 - DNA, 28 bp, Homo sapiens
cactgaagcaagttctggaggtggtagt

SEQ ID NO: 3011 - DNA, 26 bp, Homo sapiens
gctgatgcttctggcacctggaccac

SEQ ID NO: 3012 - DNA, 27 bp, Homo sapiens
ggagaggacgaggaggtcagttcagag

SEQ ID NO: 3013 - DNA, 28 bp, Homo sapiens
ccgcaggtggcaacgacgacacagtagg

SEQ ID NO: 3014 - DNA, 27 bp, Homo sapiens
ggagaggacgaggaggtcagttcagag

SEQ ID NO: 3015 - DNA, 28 bp, Homo sapiens
tcgttgctaaaagagcctacttcctaat

SEQ ID NO: 3016 - DNA, 28 bp, Homo sapiens
gctggtctaaacagaaggaagagaggtg

SEQ ID NO: 3017 - DNA, 28 bp, Homo sapiens
gaaaagtgtgtaggtcaggtgtagtggc

SEQ ID NO: 3018 - DNA, 28 bp, Homo sapiens
gagtcacctttcgtcttttccatttccc

SEQ ID NO: 3019 - DNA, 28 bp, Homo sapiens
gaaaagtgtgtaggtcaggtgtagtggc

SEQ ID NO: 3020 - DNA, 28 bp, Homo sapiens
acattctttcatctactcttccgtctgc

SEQ ID NO: 3021 - DNA, 26 bp, Homo sapiens
cacgaggcaactcacccagagacccc

SEQ ID NO: 3022 - DNA, 28 bp, Homo sapiens
gctgttcctccatctcttgccttctcct

SEQ ID NO: 3023 - DNA, 28 bp, Homo sapiens
ctctgctgggtgtcattccttttccctc

SEQ ID NO: 3024 - DNA, 28 bp, Homo sapiens
gccccgcctgtctgatttcttattgttg

SEQ ID NO: 3025 - DNA, 23 bp, Homo sapiens
tttgaaaagaccgtcgggtgcgg

SEQ ID NO: 3026 - DNA, 28 bp, Homo sapiens
ggtgtctcgctctgtcgccaggcttcag

SEQ ID NO: 3027 - DNA, 27 bp, Homo sapiens
cagtgccctggtgaagcagaggttctc

SEQ ID NO: 3028 - DNA, 28 bp, Homo sapiens
ggtgcccaggaaacagcagtgaacaagg

SEQ ID NO: 3029 - DNA, 28 bp, Homo sapiens
gccctgtgttctgtcttatctctccatc

SEQ ID NO: 3030 - DNA, 28 bp, Homo sapiens
tctctctccagggtctctcccaggctgc

SEQ ID NO: 3031 - DNA, 27 bp, Homo sapiens
ccatcaggtttggtgtctggtggaggc

SEQ ID NO: 3032 - DNA, 28 bp, Homo sapiens
ggtgtctcgctctgtcgccaggcttcag

SEQ ID NO: 3033 - DNA, 28 bp, Homo sapiens
ataaccagccacagttctcactttgaat

SEQ ID NO: 3034 - DNA, 28 bp, Homo sapiens
gagtcacctttcgtcttttccatttccc

SEQ ID NO: 3035 - DNA, 26 bp, Homo sapiens
gagacaggctgagggagaacccaagc

SEQ ID NO: 3036 - DNA, 26 bp, Homo sapiens
gccgctggcaacctccgctctttctg

SEQ ID NO: 3037 - DNA, 28 bp, Homo sapiens
ctgggacagaaggagagggaaagagttg

SEQ ID NO: 3038 - DNA, 28 bp, Homo sapiens
gccacaaggcaactggtctgaatgtttc

SEQ ID NO: 3039 - DNA, 28 bp, Homo sapiens
gtgcctggcttccttcatctaccaagac

SEQ ID NO: 3040 - DNA, 28 bp, Homo sapiens
ggaatgtttctgctaaatccaaaagtag

SEQ ID NO: 3041 - DNA, 28 bp, Homo sapiens
ggagggcaggaaggttggtgatgggcag

SEQ ID NO: 3042 - DNA, 27 bp, Homo sapiens
cctcttgacctccagcgagaccactcc

SEQ ID NO: 3043 - DNA, 28 bp, Homo sapiens
ccccacccaatgctgtccttcctttgat

SEQ ID NO: 3044 - DNA, 27 bp, Homo sapiens
ccacacacaccacccaggagcccagtg

SEQ ID NO: 3045 - DNA, 28 bp, Homo sapiens
gagtcacctttcgtcttttccatttccc

SEQ ID NO: 3046 - DNA, 28 bp, Homo sapiens
ttgaacattaggctgggcacggtgtctc

SEQ ID NO: 3047 - DNA, 34 bp, Homo sapiens; identical to SEQ ID NO: 1091

SEQ ID NO: 3048 - DNA, 33 bp, Homo sapiens; identical to SEQ ID NO: 1092

SEQ ID NO: 3049 - DNA, 35 bp, Homo sapiens; identical to SEQ ID NO: 1093

SEQ ID NO: 3050 - DNA, 34 bp, Homo sapiens; identical to SEQ ID NO: 1094

SEQ ID NO: 3051 - DNA, 34 bp, Homo sapiens; identical to SEQ ID NO: 1095

SEQ ID NO: 3052 - DNA, 35 bp, Homo sapiens; identical to SEQ ID NO: 1096

SEQ ID NO: 3053 - DNA, 34 bp, Homo sapiens; identical to SEQ ID NO: 1097

SEQ ID NO: 3054 - DNA, 34 bp, Homo sapiens; identical to SEQ ID NO: 1098

SEQ ID NO: 3055 - DNA, 34 bp, Homo sapiens; identical to SEQ ID NO: 1099

SEQ ID NO: 3056 - DNA, 35 bp, Homo sapiens; identical to SEQ ID NO: 1100

SEQ ID NO: 3057 - DNA, 34 bp, Homo sapiens; identical to SEQ ID NO: 1101

SEQ ID NO: 3058 - DNA, 35 bp, Homo sapiens; identical to SEQ ID NO: 1102

SEQ ID NO: 3059 - DNA, 34 bp, Homo sapiens; identical to SEQ ID NO: 1103

SEQ ID NO: 3060 - DNA, 34 bp, Homo sapiens; identical to SEQ ID NO: 1104

SEQ ID NO: 3061 - DNA, 34 bp, Homo sapiens; identical to SEQ ID NO: 1105

SEQ ID NO: 3062 - DNA, 34 bp, Homo sapiens; identical to SEQ ID NO: 1106

SEQ ID NO: 3063 - DNA, 34 bp, Homo sapiens; identical to SEQ ID NO: 1107

SEQ ID NO: 3064 - DNA, 33 bp, Homo sapiens; identical to SEQ ID NO: 1108

SEQ ID NO: 3065 - DNA, 32 bp, Homo sapiens; identical to SEQ ID NO: 1109

SEQ ID NO: 3066 - DNA, 33 bp, Homo sapiens; identical to SEQ ID NO: 1110

SEQ ID NO: 3067 - DNA, 33 bp, Homo sapiens; identical to SEQ ID NO: 1111

SEQ ID NO: 3068 - DNA, 33 bp, Homo sapiens; identical to SEQ ID NO: 1112

SEQ ID NO: 3069 - DNA, 33 bp, Homo sapiens; identical to SEQ ID NO: 1113

SEQ ID NO: 3070 - DNA, 34 bp, Homo sapiens; identical to SEQ ID NO: 1114

SEQ ID NO: 3071 - DNA, 32 bp, Homo sapiens; identical to SEQ ID NO: 1115

SEQ ID NO: 3072 - DNA, 32 bp, Homo sapiens; identical to SEQ ID NO: 1116

SEQ ID NO: 3073 - DNA, 34 bp, Homo sapiens; identical to SEQ ID NO: 1117

SEQ ID NO: 3074 - DNA, 34 bp, Homo sapiens; identical to SEQ ID NO: 1118

SEQ ID NO: 3075 - DNA, 32 bp, Homo sapiens; identical to SEQ ID NO: 1119

SEQ ID NO: 3076 - DNA, 34 bp, Homo sapiens; identical to SEQ ID NO: 1120

SEQ ID NO: 3077 - DNA, 34 bp, Homo sapiens; identical to SEQ ID NO: 1121

SEQ ID NO: 3078 - DNA, 33 bp, Homo sapiens; identical to SEQ ID NO: 1122

SEQ ID NO: 3079 - DNA, 34 bp, Homo sapiens; identical to SEQ ID NO: 1123

SEQ ID NO: 3080 - DNA, 34 bp, Homo sapiens; identical to SEQ ID NO: 1124

SEQ ID NO: 3081 - DNA, 34 bp, Homo sapiens; identical to SEQ ID NO: 1125

SEQ ID NO: 3082 - DNA, 34 bp, Homo sapiens; identical to SEQ ID NO: 1126

SEQ ID NO: 3083 - DNA, 34 bp, Homo sapiens; identical to SEQ ID NO: 1127

SEQ ID NO: 3084 - DNA, 35 bp, Homo sapiens; identical to SEQ ID NO: 1128

SEQ ID NO: 3085 - DNA, 34 bp, Homo sapiens; identical to SEQ ID NO: 1129

SEQ ID NO: 3086 - DNA, 34 bp, Homo sapiens; identical to SEQ ID NO: 1130

SEQ ID NO: 3087 - DNA, 35 bp, Homo sapiens; identical to SEQ ID NO: 1131

SEQ ID NO: 3088 - DNA, 33 bp, Homo sapiens; identical to SEQ ID NO: 1132

SEQ ID NO: 3089 - DNA, 35 bp, Homo sapiens; identical to SEQ ID NO: 1133

SEQ ID NO: 3090 - DNA, 34 bp, Homo sapiens; identical to SEQ ID NO: 1134

SEQ ID NO: 3091 - DNA, 35 bp, Homo sapiens; identical to SEQ ID NO: 1135

SEQ ID NO: 3092 - DNA, 34 bp, Homo sapiens; identical to SEQ ID NO: 1136

SEQ ID NO: 3093 - DNA, 34 bp, Homo sapiens; identical to SEQ ID NO: 1137

SEQ ID NO: 3094 - DNA, 34 bp, Homo sapiens; identical to SEQ ID NO: 1138

SEQ ID NO: 3095 - DNA, 32 bp, Homo sapiens; identical to SEQ ID NO: 1139

SEQ ID NO: 3096 - DNA, 33 bp, Homo sapiens; identical to SEQ ID NO: 1140

SEQ ID NO: 3097 - DNA, 34 bp, Homo sapiens; identical to SEQ ID NO: 1141

SEQ ID NO: 3098 - DNA, 34 bp, Homo sapiens; identical to SEQ ID NO: 1142

SEQ ID NO: 3099 - DNA, 34 bp, Homo sapiens; identical to SEQ ID NO: 1143

SEQ ID NO: 3100 - DNA, 31 bp, Homo sapiens; identical to SEQ ID NO: 1144

SEQ ID NO: 3101 - DNA, 33 bp, Homo sapiens; identical to SEQ ID NO: 1145

SEQ ID NO: 3102 - DNA, 33 bp, Homo sapiens; identical to SEQ ID NO: 1146

SEQ ID NO: 3103 - DNA, 32 bp, Homo sapiens; identical to SEQ ID NO: 1147

SEQ ID NO: 3104 - DNA, 33 bp, Homo sapiens; identical to SEQ ID NO: 1148

SEQ ID NO: 3105 - DNA, 33 bp, Homo sapiens; identical to SEQ ID NO: 1149

SEQ ID NO: 3106 - DNA, 32 bp, Homo sapiens; identical to SEQ ID NO: 1150

SEQ ID NO: 3107 - DNA, 32 bp, Homo sapiens; identical to SEQ ID NO: 1151

SEQ ID NO: 3108 - DNA, 34 bp, Homo sapiens; identical to SEQ ID NO: 1152

SEQ ID NO: 3109 - DNA, 35 bp, Homo sapiens; identical to SEQ ID NO: 1153

SEQ ID NO: 3110 - DNA, 32 bp, Homo sapiens; identical to SEQ ID NO: 1154

SEQ ID NO: 3111 - DNA, 35 bp, Homo sapiens; identical to SEQ ID NO: 1155

SEQ ID NO: 3112 - DNA, 34 bp, Homo sapiens; identical to SEQ ID NO: 1156

SEQ ID NO: 3113 - DNA, 32 bp, Homo sapiens; identical to SEQ ID NO: 1157

SEQ ID NO: 3114 - DNA, 32 bp, Homo sapiens; identical to SEQ ID NO: 1158

SEQ ID NO: 3115 - DNA, 34 bp, Homo sapiens; identical to SEQ ID NO: 1159

SEQ ID NO: 3116 - DNA, 34 bp, Homo sapiens; identical to SEQ ID NO: 1160

SEQ ID NO: 3117 - DNA, 60 bp, Homo sapiens; identical to SEQ ID NO: 1161

SEQ ID NO: 3118 - DNA, 60 bp, Homo sapiens; identical to SEQ ID NO: 1162

SEQ ID NO: 3119 - DNA, 60 bp, Homo sapiens; identical to SEQ ID NO: 1163

SEQ ID NO: 3120 - DNA, 60 bp, Homo sapiens; identical to SEQ ID NO: 1164

SEQ ID NO: 3121 - DNA, 60 bp, Homo sapiens; identical to SEQ ID NO: 1165

SEQ ID NO: 3122 - DNA, 60 bp, Homo sapiens; identical to SEQ ID NO: 1166

SEQ ID NO: 3123 - DNA, 60 bp, Homo sapiens; identical to SEQ ID NO: 1167

SEQ ID NO: 3124 - DNA, 60 bp, Homo sapiens; identical to SEQ ID NO: 1168

SEQ ID NO: 3125 - DNA, 60 bp, Homo sapiens; identical to SEQ ID NO: 1169

SEQ ID NO: 3126 - DNA, 60 bp, Homo sapiens; identical to SEQ ID NO: 1170

SEQ ID NO: 3127 - DNA, 60 bp, Homo sapiens; identical to SEQ ID NO: 1171

SEQ ID NO: 3128 - DNA, 60 bp, Homo sapiens; identical to SEQ ID NO: 1172

SEQ ID NO: 3129 - DNA, 60 bp, Homo sapiens; identical to SEQ ID NO: 1173

SEQ ID NO: 3130 - DNA, 60 bp, Homo sapiens; identical to SEQ ID NO: 1174

SEQ ID NO: 3131 - DNA, 60 bp, Homo sapiens; identical to SEQ ID NO: 1175

SEQ ID NO: 3132 - DNA, 60 bp, Homo sapiens; identical to SEQ ID NO: 1176

SEQ ID NO: 3133 - DNA, 60 bp, Homo sapiens; identical to SEQ ID NO: 1177

SEQ ID NO: 3134 - DNA, 60 bp, Homo sapiens; identical to SEQ ID NO: 1178

SEQ ID NO: 3135 - DNA, 60 bp, Homo sapiens; identical to SEQ ID NO: 1179

SEQ ID NO: 3136 - DNA, 60 bp, Homo sapiens; identical to SEQ ID NO: 1180

SEQ ID NO: 3137 - DNA, 60 bp, Homo sapiens; identical to SEQ ID NO: 1181

SEQ ID NO: 3138 - DNA, 60 bp, Homo sapiens; identical to SEQ ID NO: 1182

SEQ ID NO: 3139 - DNA, 60 bp, Homo sapiens; identical to SEQ ID NO: 1183

SEQ ID NO: 3140 - DNA, 60 bp, Homo sapiens; identical to SEQ ID NO: 1184

SEQ ID NO: 3141 - DNA, 60 bp, Homo sapiens; identical to SEQ ID NO: 1185

SEQ ID NO: 3142 - DNA, 60 bp, Homo sapiens; identical to SEQ ID NO: 1186

SEQ ID NO: 3143 - DNA, 60 bp, Homo sapiens; identical to SEQ ID NO: 1187

SEQ ID NO: 3144 - DNA, 60 bp, Homo sapiens; identical to SEQ ID NO: 1188

SEQ ID NO: 3145 - DNA, 60 bp, Homo sapiens; identical to SEQ ID NO: 1189

SEQ ID NO: 3146 - DNA, 60 bp, Homo sapiens; identical to SEQ ID NO: 1190

SEQ ID NO: 3147 - DNA, 60 bp, Homo sapiens; identical to SEQ ID NO: 1191

SEQ ID NO: 3148 - DNA, 60 bp, Homo sapiens; identical to SEQ ID NO: 1192

SEQ ID NO: 3149 - DNA, 60 bp, Homo sapiens; identical to SEQ ID NO: 1193

SEQ ID NO: 3150 - DNA, 60 bp, Homo sapiens; identical to SEQ ID NO: 1194

SEQ ID NO: 3151 - DNA, 60 bp, Homo sapiens; identical to SEQ ID NO: 1195

SEQ ID NO: 3152 - DNA, 60 bp, Homo sapiens; identical to SEQ ID NO: 1196

SEQ ID NO: 3153 - DNA, 60 bp, Homo sapiens; identical to SEQ ID NO: 1197

SEQ ID NO: 3154 - DNA, 60 bp, Homo sapiens; identical to SEQ ID NO: 1198

SEQ ID NO: 3155 - DNA, 60 bp, Homo sapiens; identical to SEQ ID NO: 1199

SEQ ID NO: 3156 - DNA, 60 bp, Homo sapiens; identical to SEQ ID NO: 1200

SEQ ID NO: 3157 - DNA, 60 bp, Homo sapiens; identical to SEQ ID NO: 1201

SEQ ID NO: 3158 - DNA, 60 bp, Homo sapiens; identical to SEQ ID NO: 1202

SEQ ID NO: 3159 - DNA, 60 bp, Homo sapiens; identical to SEQ ID NO: 1203

SEQ ID NO: 3160 - DNA, 60 bp, Homo sapiens; identical to SEQ ID NO: 1204

SEQ ID NO: 3161 - DNA, 60 bp, Homo sapiens; identical to SEQ ID NO: 1205

SEQ ID NO: 3162 - DNA, 60 bp, Homo sapiens; identical to SEQ ID NO: 1206

SEQ ID NO: 3163 - DNA, 60 bp, Homo sapiens; identical to SEQ ID NO: 1207

SEQ ID NO: 3164 - DNA, 60 bp, Homo sapiens; identical to SEQ ID NO: 1208

SEQ ID NO: 3165 - DNA, 60 bp, Homo sapiens; identical to SEQ ID NO: 1209

SEQ ID NO: 3166 - DNA, 60 bp, Homo sapiens; identical to SEQ ID NO: 1210

SEQ ID NO: 3167 - DNA, 23 bp, Homo sapiens
ggcaaagagcagacagggaaagg

SEQ ID NO: 3168 - DNA, 26 bp, Homo sapiens
tgacagcagaaggagcaggaccacaa

SEQ ID NO: 3169 - DNA, 23 bp, Homo sapiens
acagggaaagggaggcagaaggg

SEQ ID NO: 3170 - DNA, 24 bp, Homo sapiens
attgatgatctcgcgagacgcttt

SEQ ID NO: 3171 - DNA, 26 bp, Homo sapiens
aaagagcagacagggaaagggaggca

SEQ ID NO: 3172 - DNA, 23 bp, Homo sapiens
gacgcaggaatggaagggaaagg

SEQ ID NO: 3173 - DNA, 23 bp, Homo sapiens
tgaggcgtgtccgatgtgggaat

SEQ ID NO: 3174 - DNA, 24 bp, Homo sapiens
gagggagaaaggaatgaaggctgc

SEQ ID NO: 3175 - DNA, 26 bp, Homo sapiens
catagtggattgaaacagggtggagc

SEQ ID NO: 3176 - DNA, 23 bp, Homo sapiens
ccccacaagcccacaaaagccat

SEQ ID NO: 3177 - DNA, 23 bp, Homo sapiens
acaagacctctcctccctgagtc

SEQ ID NO: 3178 - DNA, 24 bp, Homo sapiens
ctcgcctgacagacgttattgtct

SEQ ID NO: 3179 - DNA, 23 bp, Homo sapiens
aggtggagcccatcaagcggtat

SEQ ID NO: 3180 - DNA, 23 bp, Homo sapiens
tgaccttccccgcagacagtgct

SEQ ID NO: 3181 - DNA, 23 bp, Homo sapiens
gagacaggcaggtgagagaaagg

SEQ ID NO: 3182 - DNA, 23 bp, Homo sapiens
ggacagtttccataactgctggc

SEQ ID NO: 3183 - DNA, 23 bp, Homo sapiens
gaggtgctggagtgtggctgtga

SEQ ID NO: 3184 - DNA, 23 bp, Homo sapiens
ttggctgaccttgggtgtggtgt

SEQ ID NO: 3185 - DNA, 23 bp, Homo sapiens
tgaggcgtgtccgatgtgggaat

SEQ ID NO: 3186 - DNA, 23 bp, Homo sapiens
gagacaggcaggtgagagaaagg

SEQ ID NO: 3187 - DNA, 25 bp, Homo sapiens
aaatcgaatcacttcatcgaattct

SEQ ID NO: 3188 - DNA, 23 bp, Homo sapiens
agcaaggtgaggtgacagggagc

SEQ ID NO: 3189 - DNA, 24 bp, Homo sapiens
tagagtacgtgtcccaactgttgc

SEQ ID NO: 3190 - DNA, 23 bp, Homo sapiens
taagcgcgcgtacagtagggcga

SEQ ID NO: 3191 - DNA, 23 bp, Homo sapiens
gatgggagacaggcaggtgagag

SEQ ID NO: 3192 - DNA, 23 bp, Homo sapiens
agacatcctgagagaccagaggg

SEQ ID NO: 3193 - DNA, 23 bp, Homo sapiens
aggaggagcagcaccagcactgt

SEQ ID NO: 3194 - DNA, 23 bp, Homo sapiens
tacaggtttgaggtgcccgtcgc

SEQ ID NO: 3195 - DNA, 23 bp, Homo sapiens
gagggacgcaggaatggaaggga

SEQ ID NO: 3196 - DNA, 23 bp, Homo sapiens
acaagacctctcctccctgagtc

SEQ ID NO: 3197 - DNA, 23 bp, Homo sapiens
gtgccgctgtgtaggaaagaagc

SEQ ID NO: 3198 - DNA, 26 bp, Homo sapiens
atggacaaccaggtggcaggaaaggt

SEQ ID NO: 3199 - DNA, 23 bp, Homo sapiens
aaggtaaccatcggagcccgtga

SEQ ID NO: 3200 - DNA, 23 bp, Homo sapiens
taccaagagggtggcactgggct

SEQ ID NO: 3201 - DNA, 23 bp, Homo sapiens
ctgaggcgtgtccgatgtgggaa

SEQ ID NO: 3202 - DNA, 23 bp, Homo sapiens
cccaacataaggcaactcatgcg

SEQ ID NO: 3203 - DNA, 24 bp, Homo sapiens
ggatacacatgcgcctcggtccga

SEQ ID NO: 3204 - DNA, 23 bp, Homo sapiens
cgggtgccgctgtgtaggaaaga

SEQ ID NO: 3205 - DNA, 26 bp, Homo sapiens
acacaagagagagagacgcaggtgac

SEQ ID NO: 3206 - DNA, 23 bp, Homo sapiens
gatgggagacaggcaggtgagag

SEQ ID NO: 3207 - DNA, 23 bp, Homo sapiens
ctgccaatgagagtgtcagcccg

SEQ ID NO: 3208 - DNA, 25 bp, Homo sapiens
ggaacgaatatgaggcagactctca

SEQ ID NO: 3209 - DNA, 26 bp, Homo sapiens
aaggcagagaacaaaacacagaggtg

SEQ ID NO: 3210 - DNA, 25 bp, Homo sapiens
cacagaaggcgtgcgagcaccaatg

SEQ ID NO: 3211 - DNA, 23 bp, Homo sapiens
gactgggagcagggttttgatgg

SEQ ID NO: 3212 - DNA, 23 bp, Homo sapiens
ttggaggtggaggtctgccaggt

SEQ ID NO: 3213 - DNA, 23 bp, Homo sapiens
gactgggagcagggttttgatgg

SEQ ID NO: 3214 - DNA, 24 bp, Homo sapiens
taccaaagctgagagtcgtctatc

SEQ ID NO: 3215 - DNA, 23 bp, Homo sapiens
cattgccactcccagtcgggcta

SEQ ID NO: 3216 - DNA, 23 bp, Homo sapiens
ttggaggtggaggtctgccaggt

SEQ ID NO: 3217 - DNA, 23 bp, Homo sapiens
ctctcccttctctcctaccctgc

SEQ ID NO: 3218 - DNA, 26 bp, Homo sapiens
aggatggtgacccttgtatcagttag

SEQ ID NO: 3219 - DNA, 23 bp, Homo sapiens
gtccatctgtccagtcaggtcct

SEQ ID NO: 3220 - DNA, 25 bp, Homo sapiens
aaaggcgtccagtctcgtgtataag

SEQ ID NO: 3221 - DNA, 26 bp, Homo sapiens
tattctttcccagagtcccatcttgg

SEQ ID NO: 3222 - DNA, 23 bp, Homo sapiens
ctccatctcccacagcatccagc

SEQ ID NO: 3223 - DNA, 23 bp, Homo sapiens
acgacatcgccgcagcactcatc

SEQ ID NO: 3224 - DNA, 26 bp, Homo sapiens
ccttttgaataggagatttcctttaa

SEQ ID NO: 3225 - DNA, 26 bp, Homo sapiens
ggagaagaggactgtagaaggagaca

SEQ ID NO: 3226 - DNA, 23 bp, Homo sapiens
ccgcccatctgtaagcccatctc

SEQ ID NO: 3227 - DNA, 23 bp, Homo sapiens
gctgttcctgcctctctgctacg

SEQ ID NO: 3228 - DNA, 23 bp, Homo sapiens
cacaggcaaaaatgtaactttcc

SEQ ID NO: 3229 - DNA, 23 bp, Homo sapiens
tgaagtggcatctctctcccgcc

SEQ ID NO: 3230 - DNA, 23 bp, Homo sapiens
gtttggtagtggctgtctggagc

SEQ ID NO: 3231 - DNA, 23 bp, Homo sapiens
atccgcctccacacacccacact

SEQ ID NO: 3232 - DNA, 25 bp, Homo sapiens
taacgcccatctacacttagctata

SEQ ID NO: 3233 - DNA, 23 bp, Homo sapiens
cgcttgagttggtgctgaatgcc

SEQ ID NO: 3234 - DNA, 23 bp, Homo sapiens
tgaagtggcatctctctcccgcc

SEQ ID NO: 3235 - DNA, 23 bp, Homo sapiens
tgggagagcactcgggaacctca

SEQ ID NO: 3236 - DNA, 23 bp, Homo sapiens
cctttccgctacctggctgtggt

SEQ ID NO: 3237 - DNA, 25 bp, Homo sapiens
ttgaacactcggtcgaaggcgctcg

SEQ ID NO: 3238 - DNA, 23 bp, Homo sapiens
cctggaagatgtgggaggctgtt

SEQ ID NO: 3239 - DNA, 24 bp, Homo sapiens
gcacgctactgttacgagattcct

SEQ ID NO: 3240 - DNA, 23 bp, Homo sapiens
ccgaagaaaagttaagcccctcg

SEQ ID NO: 3241 - DNA, 23 bp, Homo sapiens
ctctggcttgaccttctccactg

SEQ ID NO: 3242 - DNA, 23 bp, Homo sapiens
gcctggagcaacttcctgtgcca

SEQ ID NO: 3243 - DNA, 23 bp, Homo sapiens
ccttcctctgggctctctgtaac

SEQ ID NO: 3244 - DNA, 23 bp, Homo sapiens
ggcttccagtgtagaggttaccc

SEQ ID NO: 3245 - DNA, 23 bp, Homo sapiens
gtgtgttttgaggagcacccagc

SEQ ID NO: 3246 - DNA, 23 bp, Homo sapiens
cctggtggacttggcttcgttcc

SEQ ID NO: 3247 - DNA, 23 bp, Homo sapiens
ggtgttgaggtccagtcttccgc

SEQ ID NO: 3248 - DNA, 26 bp, Homo sapiens
aaagtatgtagcaaagcaccccactg

SEQ ID NO: 3249 - DNA, 25 bp, Homo sapiens
ctggcatgaaatactacgggccttc

SEQ ID NO: 3250 - DNA, 24 bp, Homo sapiens
cgtgtggttatggaatcagggtgc

SEQ ID NO: 3251 - DNA, 23 bp, Homo sapiens
aaggacttgagcaggtgatgggc

SEQ ID NO: 3252 - DNA, 25 bp, Homo sapiens
atgattgccgcattttcacggttgc

SEQ ID NO: 3253 - DNA, 24 bp, Homo sapiens
tcatcaagcccgccaacgggttag

SEQ ID NO: 3254 - DNA, 23 bp, Homo sapiens
ggagtccttcaccacacagtcac

SEQ ID NO: 3255 - DNA, 26 bp, Homo sapiens
cagccaggtagaaatgaatacagggt

SEQ ID NO: 3256 - DNA, 23 bp, Homo sapiens
gcagacaaaggctgagagagagg

SEQ ID NO: 3257 - DNA, 23 bp, Homo sapiens
cagtggatggtggaaaccctgga

SEQ ID NO: 3258 - DNA, 23 bp, Homo sapiens
atcgctatctgtccgtaacgtcg

SEQ ID NO: 3259 - DNA, 26 bp, Homo sapiens
gcaggaaagactcaagcactctggac

SEQ ID NO: 3260 - DNA, 25 bp, Homo sapiens
ctatcatcggtcacttgtgttaggt

SEQ ID NO: 3261 - DNA, 23 bp, Homo sapiens
gcctcactgtctcagccctgcta

SEQ ID NO: 3262 - DNA, 23 bp, Homo sapiens
tgtccccttctactaccccacct

SEQ ID NO: 3263 - DNA, 23 bp, Homo sapiens
ccccaagcaggctctggcacata

SEQ ID NO: 3264 - DNA, 25 bp, Homo sapiens
tatcttctaatagtacctctattaa

SEQ ID NO: 3265 - DNA, 23 bp, Homo sapiens
gggaaggaaaagagggcaagtcc

SEQ ID NO: 3266 - DNA, 23 bp, Homo sapiens
ggtccactggcaatcaccctact

SEQ ID NO: 3267 - DNA, 60 bp, Homo sapiens; identical to SEQ ID NO: 1211

SEQ ID NO: 3268 - DNA, 60 bp, Homo sapiens; identical to SEQ ID NO: 1212

SEQ ID NO: 3269 - DNA, 60 bp, Homo sapiens; identical to SEQ ID NO: 1213

SEQ ID NO: 3270 - DNA, 60 bp, Homo sapiens; identical to SEQ ID NO: 1214

SEQ ID NO: 3271 - DNA, 60 bp, Homo sapiens; identical to SEQ ID NO: 1215

SEQ ID NO: 3272 - DNA, 60 bp, Homo sapiens; identical to SEQ ID NO: 1216

SEQ ID NO: 3273 - DNA, 60 bp, Homo sapiens; identical to SEQ ID NO: 1217

SEQ ID NO: 3274 - DNA, 60 bp, Homo sapiens; identical to SEQ ID NO: 1218

SEQ ID NO: 3275 - DNA, 60 bp, Homo sapiens; identical to SEQ ID NO: 1219

SEQ ID NO: 3276 - DNA, 60 bp, Homo sapiens; identical to SEQ ID NO: 1220

SEQ ID NO: 3277 - DNA, 60 bp, Homo sapiens; identical to SEQ ID NO: 1221

SEQ ID NO: 3278 - DNA, 60 bp, Homo sapiens; identical to SEQ ID NO: 1222

SEQ ID NO: 3279 - DNA, 60 bp, Homo sapiens; identical to SEQ ID NO: 1223

SEQ ID NO: 3280 - DNA, 60 bp, Homo sapiens; identical to SEQ ID NO: 1224

SEQ ID NO: 3281 - DNA, 60 bp, Homo sapiens; identical to SEQ ID NO: 1225

SEQ ID NO: 3282 - DNA, 60 bp, Homo sapiens; identical to SEQ ID NO: 1226

SEQ ID NO: 3283 - DNA, 60 bp, Homo sapiens; identical to SEQ ID NO: 1227

SEQ ID NO: 3284 - DNA, 60 bp, Homo sapiens; identical to SEQ ID NO: 1228

SEQ ID NO: 3285 - DNA, 60 bp, Homo sapiens; identical to SEQ ID NO: 1229

SEQ ID NO: 3286 - DNA, 60 bp, Homo sapiens; identical to SEQ ID NO: 1230

SEQ ID NO: 3287 - DNA, 60 bp, Homo sapiens; identical to SEQ ID NO: 1231

SEQ ID NO: 3288 - DNA, 60 bp, Homo sapiens; identical to SEQ ID NO: 1232

SEQ ID NO: 3289 - DNA, 60 bp, Homo sapiens; identical to SEQ ID NO: 1233

SEQ ID NO: 3290 - DNA, 60 bp, Homo sapiens; identical to SEQ ID NO: 1234

SEQ ID NO: 3291 - DNA, 60 bp, Homo sapiens; identical to SEQ ID NO: 1235

SEQ ID NO: 3292 - DNA, 60 bp, Homo sapiens; identical to SEQ ID NO: 1236

SEQ ID NO: 3293 - DNA, 60 bp, Homo sapiens; identical to SEQ ID NO: 1237

SEQ ID NO: 3294 - DNA, 60 bp, Homo sapiens; identical to SEQ ID NO: 1238

SEQ ID NO: 3295 - DNA, 60 bp, Homo sapiens; identical to SEQ ID NO: 1239

SEQ ID NO: 3296 - DNA, 60 bp, Homo sapiens; identical to SEQ ID NO: 1240

SEQ ID NO: 3297 - DNA, 60 bp, Homo sapiens; identical to SEQ ID NO: 1241

SEQ ID NO: 3298 - DNA, 60 bp, Homo sapiens; identical to SEQ ID NO: 1242

SEQ ID NO: 3299 - DNA, 60 bp, Homo sapiens; identical to SEQ ID NO: 1243

SEQ ID NO: 3300 - DNA, 60 bp, Homo sapiens; identical to SEQ ID NO: 1244

SEQ ID NO: 3301 - DNA, 60 bp, Homo sapiens; identical to SEQ ID NO: 1245

SEQ ID NO: 3302 - DNA, 60 bp, Homo sapiens; identical to SEQ ID NO: 1246

SEQ ID NO: 3303 - DNA, 60 bp, Homo sapiens; identical to SEQ ID NO: 1247

SEQ ID NO: 3304 - DNA, 60 bp, Homo sapiens; identical to SEQ ID NO: 1248

SEQ ID NO: 3305 - DNA, 60 bp, Homo sapiens; identical to SEQ ID NO: 1249

SEQ ID NO: 3306 - DNA, 60 bp, Homo sapiens; identical to SEQ ID NO: 1250

SEQ ID NO: 3307 - DNA, 60 bp, Homo sapiens; identical to SEQ ID NO: 1251

SEQ ID NO: 3308 - DNA, 60 bp, Homo sapiens; identical to SEQ ID NO: 1252

SEQ ID NO: 3309 - DNA, 60 bp, Homo sapiens; identical to SEQ ID NO: 1253

SEQ ID NO: 3310 - DNA, 60 bp, Homo sapiens; identical to SEQ ID NO: 1254

SEQ ID NO: 3311 - DNA, 60 bp, Homo sapiens; identical to SEQ ID NO: 1255

SEQ ID NO: 3312 - DNA, 60 bp, Homo sapiens; identical to SEQ ID NO: 1256

SEQ ID NO: 3313 - DNA, 60 bp, Homo sapiens; identical to SEQ ID NO: 1257

SEQ ID NO: 3314 - DNA, 60 bp, Homo sapiens; identical to SEQ ID NO: 1258

SEQ ID NO: 3315 - DNA, 60 bp, Homo sapiens; identical to SEQ ID NO: 1259

SEQ ID NO: 3316 - DNA, 60 bp, Homo sapiens; identical to SEQ ID NO: 1260

SEQ ID NO: 3317 - DNA, 24 bp, Homo sapiens
attgagttgttgaccctacaagca

SEQ ID NO: 3318 - DNA, 23 bp, Homo sapiens
atcgtcgtcgctcctcaaacttg

SEQ ID NO: 3319 - DNA, 25 bp, Homo sapiens
cgctctatcaactctagaatgttgt

SEQ ID NO: 3320 - DNA, 23 bp, Homo sapiens
gtgctcaggacgacagtctggga

SEQ ID NO: 3321 - DNA, 24 bp, Homo sapiens
caggggcccttctaacgaagcggg

SEQ ID NO: 3322 - DNA, 23 bp, Homo sapiens
gctgcttgcttgtgggacttgcc

SEQ ID NO: 3323 - DNA, 25 bp, Homo sapiens
caagtcgcagctcggggcagatctt

SEQ ID NO: 3324 - DNA, 24 bp, Homo sapiens
atgggcgctcttactccgttgggc

SEQ ID NO: 3325 - DNA, 25 bp, Homo sapiens
cttaaagactgtccatttgacaaca

SEQ ID NO: 3326 - DNA, 25 bp, Homo sapiens
tcatcggcgggaggcggtcccaggc

SEQ ID NO: 3327 - DNA, 24 bp, Homo sapiens
ccaaatcgcagcgtagggctagga

SEQ ID NO: 3328 - DNA, 24 bp, Homo sapiens
tccagtaaagggccgggaggttat

SEQ ID NO: 3329 - DNA, 23 bp, Homo sapiens
aaccgcacatagtaaatagctca

SEQ ID NO: 3330 - DNA, 23 bp, Homo sapiens
ggtgatgagcaaagaagtggaaa

SEQ ID NO: 3331 - DNA, 24 bp, Homo sapiens
gctttagtgttgaaatctcccttg

SEQ ID NO: 3332 - DNA, 23 bp, Homo sapiens
cagtttctgaccggccgtgggcc

SEQ ID NO: 3333 - DNA, 24 bp, Homo sapiens
tcgcgatgaatggggtgagcggga

SEQ ID NO: 3334 - DNA, 23 bp, Homo sapiens
ctgaggcgtgtccgatgtgggaa

SEQ ID NO: 3335 - DNA, 25 bp, Homo sapiens
cgcgaaggaggtgcaaggcccaaag

SEQ ID NO: 3336 - DNA, 23 bp, Homo sapiens
acagggaaagggaggcagaaggg

SEQ ID NO: 3337 - DNA, 24 bp, Homo sapiens
gatggagcagaacaggaagttggg

SEQ ID NO: 3338 - DNA, 23 bp, Homo sapiens
ccaggtgaggttggcagcaagca

SEQ ID NO: 3339 - DNA, 23 bp, Homo sapiens
ggatggatgtgggaatggatggg

SEQ ID NO: 3340 - DNA, 23 bp, Homo sapiens
tatctcaggtatcttgaaagatt

SEQ ID NO: 3341 - DNA, 24 bp, Homo sapiens
cacccgtgctagtgtcgtatactg

SEQ ID NO: 3342 - DNA, 24 bp, Homo sapiens
gaaatagagggcttactatatgtt

SEQ ID NO: 3343 - DNA, 23 bp, Homo sapiens
atcaaaatcgtagccgcatggca

SEQ ID NO: 3344 - DNA, 25 bp, Homo sapiens
cggtcccgcagctccggttaacgct

SEQ ID NO: 3345 - DNA, 23 bp, Homo sapiens
gatgggagacaggcaggtgagag

SEQ ID NO: 3346 - DNA, 26 bp, Homo sapiens
tcacctctcctccgtcccaccatttt

SEQ ID NO: 3347 - DNA, 26 bp, Homo sapiens
gaccaaagcacctctgaaggacaaag

SEQ ID NO: 3348 - DNA, 26 bp, Homo sapiens
gaccaaagcacctctgaaggacaaag

SEQ ID NO: 3349 - DNA, 26 bp, Homo sapiens
tcctaactggattgccacacttggtg

SEQ ID NO: 3350 - DNA, 23 bp, Homo sapiens
gctaatacctgtaagaggtagtt

SEQ ID NO: 3351 - DNA, 23 bp, Homo sapiens
tgagtgagcagtgagcggtggca

SEQ ID NO: 3352 - DNA, 26 bp, Homo sapiens
cttttgagaatgccgaggtaatgggc

SEQ ID NO: 3353 - DNA, 26 bp, Homo sapiens
agaatcacctactcagggacacactg

SEQ ID NO: 3354 - DNA, 25 bp, Homo sapiens
gccctaaggctctctggagcggagt

SEQ ID NO: 3355 - DNA, 23 bp, Homo sapiens
agcaaggtgaggtgacagggagc

SEQ ID NO: 3356 - DNA, 23 bp, Homo sapiens
acagcaaggtgaggtgacaggga

SEQ ID NO: 3357 - DNA, 23 bp, Homo sapiens
gcgcggaaaagtcaatagaagat

SEQ ID NO: 3358 - DNA, 23 bp, Homo sapiens
gggaggactctggtctcagggat

SEQ ID NO: 3359 - DNA, 25 bp, Homo sapiens
tctcttaccatcaattgacatcttt

SEQ ID NO: 3360 - DNA, 23 bp, Homo sapiens
agcaaggtgaggtgacagggagc

SEQ ID NO: 3361 - DNA, 26 bp, Homo sapiens
gaccaaagcacctctgaaggacaaag

SEQ ID NO: 3362 - DNA, 23 bp, Homo sapiens
gttcccgccttcctccatcttgc

SEQ ID NO: 3363 - DNA, 25 bp, Homo sapiens
ctccccgagaccgataagcaatcag

SEQ ID NO: 3364 - DNA, 23 bp, Homo sapiens
acaggtgggtccgcacagtcgcc

SEQ ID NO: 3365 - DNA, 25 bp, Homo sapiens
ataaatgtgtcccaggataggaggc

SEQ ID NO: 3366 - DNA, 25 bp, Homo sapiens
ccagtcgattgataaggcggcgcac

SEQ ID NO: 3367 - DNA, 24 bp, Homo sapiens
taagccgacaggaccgaacggtca

SEQ ID NO: 3368 - DNA, 23 bp, Homo sapiens
tgtggcgttcacgattcaggcat

SEQ ID NO: 3369 - DNA, 25 bp, Homo sapiens
atacaaggccaatcgtgcggatgcg

SEQ ID NO: 3370 - DNA, 23 bp, Homo sapiens
agcagaaggagcaggaccacaag

SEQ ID NO: 3371 - DNA, 24 bp, Homo sapiens
tgctggatatcctagtgagcgcga

SEQ ID NO: 3372 - DNA, 23 bp, Homo sapiens
agcagaaggagcaggaccacaag

SEQ ID NO: 3373 - DNA, 23 bp, Homo sapiens
atgggaactaagggtgagtagta

SEQ ID NO: 3374 - DNA, 24 bp, Homo sapiens
agcatgtgggacgtagtcggagag

SEQ ID NO: 3375 - DNA, 24 bp, Homo sapiens
attttcacgtagatcataaccggt

SEQ ID NO: 3376 - DNA, 25 bp, Homo sapiens
tctcagaaaagctctggagccaccc

SEQ ID NO: 3377 - DNA, 23 bp, Homo sapiens
cctctctgagagtcggatctcgc

SEQ ID NO: 3378 - DNA, 23 bp, Homo sapiens
gaaactgttcagctctggcaaga

SEQ ID NO: 3379 - DNA, 24 bp, Homo sapiens
cgtaccaaattccgttttataagg

SEQ ID NO: 3380 - DNA, 24 bp, Homo sapiens
gaaataagcaggtcccgttacctc

SEQ ID NO: 3381 - DNA, 25 bp, Homo sapiens
aattggcttaactgtagcatgcaca

SEQ ID NO: 3382 - DNA, 24 bp, Homo sapiens
atccaaacacaaatcgctgtggca

SEQ ID NO: 3383 - DNA, 23 bp, Homo sapiens
atatgtcctcgttactattggtt

SEQ ID NO: 3384 - DNA, 23 bp, Homo sapiens
gtttgctgtcctccatcctccca

SEQ ID NO: 3385 - DNA, 23 bp, Homo sapiens
aaggggtcaaggacctacatcaa

SEQ ID NO: 3386 - DNA, 23 bp, Homo sapiens
ttaccacgccaatcccagccctt

SEQ ID NO: 3387 - DNA, 23 bp, Homo sapiens
tgaagtggcatctctctcccgcc

SEQ ID NO: 3388 - DNA, 23 bp, Homo sapiens
ccctgcctcttcacaaagcaagc

SEQ ID NO: 3389 - DNA, 23 bp, Homo sapiens
ctgaggcgtgtccgatgtgggaa

SEQ ID NO: 3390 - DNA, 23 bp, Homo sapiens
tggaagagactatactcaggtta

SEQ ID NO: 3391 - DNA, 25 bp, Homo sapiens
tcaaatctagatgtatcatgcgcaa

SEQ ID NO: 3392 - DNA, 23 bp, Homo sapiens
ctcgcttaagcaggtgcgtgctt

SEQ ID NO: 3393 - DNA, 25 bp, Homo sapiens
gggccatttaaagaaagaggaacag

SEQ ID NO: 3394 - DNA, 24 bp, Homo sapiens
agtatcagttcgcctgtgagcagc

SEQ ID NO: 3395 - DNA, 23 bp, Homo sapiens
tgtcacctcttccaccctctcag

SEQ ID NO: 3396 - DNA, 26 bp, Homo sapiens
acaatctctccactaagcaaaccctg

SEQ ID NO: 3397 - DNA, 26 bp, Homo sapiens
cacatacaaagcatcattccaggtgc

SEQ ID NO: 3398 - DNA, 26 bp, Homo sapiens
cctcagggaaagggaaaaccaagagt

SEQ ID NO: 3399 - DNA, 26 bp, Homo sapiens
ccctgggactaacactttctgtgatg

SEQ ID NO: 3400 - DNA, 24 bp, Homo sapiens
accccgtcattcataccgagaacc

SEQ ID NO: 3401 - DNA, 26 bp, Homo sapiens
ccaaaagaaaactgaccccttagagg

SEQ ID NO: 3402 - DNA, 26 bp, Homo sapiens
tgctattatctggtgactggactggg

SEQ ID NO: 3403 - DNA, 26 bp, Homo sapiens
gaaaggttatccagaatacagaaggg

SEQ ID NO: 3404 - DNA, 23 bp, Homo sapiens
ataactgacacattgttacaaaa

SEQ ID NO: 3405 - DNA, 23 bp, Homo sapiens
gctctcccttgtagcctgttagg

SEQ ID NO: 3406 - DNA, 23 bp, Homo sapiens
tggcagcatcgcaccatccccat

SEQ ID NO: 3407 - DNA, 23 bp, Homo sapiens
tgctattggctaaaattagaaag

SEQ ID NO: 3408 - DNA, 23 bp, Homo sapiens
caaggaatgcccgagtcaggtga

SEQ ID NO: 3409 - DNA, 25 bp, Homo sapiens
atacctgcaaccccgcaactgtcct

SEQ ID NO: 3410 - DNA, 23 bp, Homo sapiens
aagagtaggaaacccctggcagc

SEQ ID NO: 3411 - DNA, 26 bp, Homo sapiens
gaacatctacttcaacctcctgccca

SEQ ID NO: 3412 - DNA, 23 bp, Homo sapiens
ccccttgcctcttgtttgaagcc

SEQ ID NO: 3413 - DNA, 23 bp, Homo sapiens
tgaaggtgtaatcagtttgagta

SEQ ID NO: 3414 - DNA, 25 bp, Homo sapiens
tcctgtcccgacaatgcgggtggca

SEQ ID NO: 3415 - DNA, 26 bp, Homo sapiens
gttttcagtggaatagagagatgtgt

SEQ ID NO: 3416 - DNA, 24 bp, Homo sapiens
aacgccaaccttgtgctaagcacc

SEQ ID NO: 3417 - DNA, 60 bp, Homo sapiens; identical to SEQ ID NO: 1261

SEQ ID NO: 3418 - DNA, 60 bp, Homo sapiens; identical to SEQ ID NO: 1262

SEQ ID NO: 3419 - DNA, 60 bp, Homo sapiens; identical to SEQ ID NO: 1263

SEQ ID NO: 3420 - DNA, 60 bp, Homo sapiens; identical to SEQ ID NO: 1264

SEQ ID NO: 3421 - DNA, 60 bp, Homo sapiens; identical to SEQ ID NO: 1265

SEQ ID NO: 3422 - DNA, 60 bp, Homo sapiens; identical to SEQ ID NO: 1266

SEQ ID NO: 3423 - DNA, 60 bp, Homo sapiens; identical to SEQ ID NO: 1267

SEQ ID NO: 3424 - DNA, 60 bp, Homo sapiens; identical to SEQ ID NO: 1268

SEQ ID NO: 3425 - DNA, 60 bp, Homo sapiens; identical to SEQ ID NO: 1269

SEQ ID NO: 3426 - DNA, 60 bp, Homo sapiens; identical to SEQ ID NO: 1270

SEQ ID NO: 3427 - DNA, 60 bp, Homo sapiens; identical to SEQ ID NO: 1271

SEQ ID NO: 3428 - DNA, 60 bp, Homo sapiens; identical to SEQ ID NO: 1272

SEQ ID NO: 3429 - DNA, 60 bp, Homo sapiens; identical to SEQ ID NO: 1273

SEQ ID NO: 3430 - DNA, 60 bp, Homo sapiens; identical to SEQ ID NO: 1274

SEQ ID NO: 3431 - DNA, 60 bp, Homo sapiens; identical to SEQ ID NO: 1275

SEQ ID NO: 3432 - DNA, 60 bp, Homo sapiens; identical to SEQ ID NO: 1276

SEQ ID NO: 3433 - DNA, 60 bp, Homo sapiens; identical to SEQ ID NO: 1277

SEQ ID NO: 3434 - DNA, 60 bp, Homo sapiens; identical to SEQ ID NO: 1278

SEQ ID NO: 3435 - DNA, 60 bp, Homo sapiens; identical to SEQ ID NO: 1515

SEQ ID NO: 3436 - DNA, 60 bp, Homo sapiens; identical to SEQ ID NO: 1516

SEQ ID NO: 3437 - DNA, 60 bp, Homo sapiens; identical to SEQ ID NO: 1517

SEQ ID NO: 3438 - DNA, 60 bp, Homo sapiens; identical to SEQ ID NO: 1518

SEQ ID NO: 3439 - DNA, 60 bp, Homo sapiens; identical to SEQ ID NO: 1519

SEQ ID NO: 3440 - DNA, 60 bp, Homo sapiens; identical to SEQ ID NO: 1520

SEQ ID NO: 3441 - DNA, 60 bp, Homo sapiens; identical to SEQ ID NO: 1521

SEQ ID NO: 3442 - DNA, 60 bp, Homo sapiens; identical to SEQ ID NO: 1522

SEQ ID NO: 3443 - DNA, 60 bp, Homo sapiens; identical to SEQ ID NO: 1523

SEQ ID NO: 3444 - DNA, 60 bp, Homo sapiens; identical to SEQ ID NO: 1524

SEQ ID NO: 3445 - DNA, 60 bp, Homo sapiens; identical to SEQ ID NO: 1525

SEQ ID NO: 3446 - DNA, 60 bp, Homo sapiens; identical to SEQ ID NO: 1526

SEQ ID NO: 3447 - DNA, 60 bp, Homo sapiens; identical to SEQ ID NO: 1527

SEQ ID NO: 3448 - DNA, 60 bp, Homo sapiens; identical to SEQ ID NO: 1528

SEQ ID NO: 3449 - DNA, 60 bp, Homo sapiens; identical to SEQ ID NO: 1529

SEQ ID NO: 3450 - DNA, 60 bp, Homo sapiens; identical to SEQ ID NO: 1530

SEQ ID NO: 3451 - DNA, 60 bp, Homo sapiens; identical to SEQ ID NO: 1531

SEQ ID NO: 3452 - DNA, 60 bp, Homo sapiens; identical to SEQ ID NO: 1532

SEQ ID NO: 3453 - DNA, 60 bp, Homo sapiens; identical to SEQ ID NO: 1533

SEQ ID NO: 3454 - DNA, 60 bp, Homo sapiens; identical to SEQ ID NO: 1534

SEQ ID NO: 3455 - DNA, 60 bp, Homo sapiens; identical to SEQ ID NO: 1535

SEQ ID NO: 3456 - DNA, 60 bp, Homo sapiens; identical to SEQ ID NO: 1536

SEQ ID NO: 3457 - DNA, 60 bp, Homo sapiens; identical to SEQ ID NO: 1537

SEQ ID NO: 3458 - DNA, 60 bp, Homo sapiens; identical to SEQ ID NO: 1538

SEQ ID NO: 3459 - DNA, 60 bp, Homo sapiens; identical to SEQ ID NO: 1539

SEQ ID NO: 3460 - DNA, 60 bp, Homo sapiens; identical to SEQ ID NO: 1540

SEQ ID NO: 3461 - DNA, 60 bp, Homo sapiens; identical to SEQ ID NO: 1541

SEQ ID NO: 3462 - DNA, 60 bp, Homo sapiens; identical to SEQ ID NO: 1542

SEQ ID NO: 3463 - DNA, 60 bp, Homo sapiens; identical to SEQ ID NO: 1543

SEQ ID NO: 3464 - DNA, 60 bp, Homo sapiens; identical to SEQ ID NO: 1544

SEQ ID NO: 3465 - DNA, 60 bp, Homo sapiens; identical to SEQ ID NO: 1545

SEQ ID NO: 3466 - DNA, 60 bp, Homo sapiens; identical to SEQ ID NO: 1546

SEQ ID NO: 3467 - DNA, 25 bp, Homo sapiens
ataaatgtgtcccaggataggaggc

SEQ ID NO: 3468 - DNA, 26 bp, Homo sapiens
tcccaacatttgccaccacctactcc

SEQ ID NO: 3469 - DNA, 23 bp, Homo sapiens
agtcgtccggagacgtggttcct

SEQ ID NO: 3470 - DNA, 23 bp, Homo sapiens
gatgggagacaggcaggtgagag

SEQ ID NO: 3471 - DNA, 23 bp, Homo sapiens
gctgtcttccccgtcacacatcc

SEQ ID NO: 3472 - DNA, 24 bp, Homo sapiens
gaagaccaggagaggcatcaactg

SEQ ID NO: 3473 - DNA, 26 bp, Homo sapiens
cgcaatgactggaacgggattctcta

SEQ ID NO: 3474 - DNA, 23 bp, Homo sapiens
tgaagtggcatctctctcccgcc

SEQ ID NO: 3475 - DNA, 23 bp, Homo sapiens
tctcctgctccccactccacagt

SEQ ID NO: 3476 - DNA, 23 bp, Homo sapiens
tcagcagggcaggaacacagtgg

SEQ ID NO: 3477 - DNA, 23 bp, Homo sapiens
tggcaggagtagccgtgaaaggc

SEQ ID NO: 3478 - DNA, 23 bp, Homo sapiens
gggcagacaggcagaaggacaga

SEQ ID NO: 3479 - DNA, 26 bp, Homo sapiens
aggcgacagggttcgggctttattct

SEQ ID NO: 3480 - DNA, 26 bp, Homo sapiens
cccgtcacacatccaaacaagagcat

SEQ ID NO: 3481 - DNA, 26 bp, Homo sapiens
ccccgtcacacatccaaacaagagca

SEQ ID NO: 3482 - DNA, 25 bp, Homo sapiens
ataaatgtgtcccaggataggaggc

SEQ ID NO: 3483 - DNA, 24 bp, Homo sapiens
tcaccccgctcgtgtagaacagcg

SEQ ID NO: 3484 - DNA, 26 bp, Homo sapiens
tagagaacaagaggtgctggagtgtg

SEQ ID NO: 3485 - DNA, 23 bp, Homo sapiens
cctttaccctaatattttgtgcc

SEQ ID NO: 3486 - DNA, 23 bp, Homo sapiens
cgtcacagctctattcgacggtg

SEQ ID NO: 3487 - DNA, 23 bp, Homo sapiens
atgtccacacccactgccacgat

SEQ ID NO: 3488 - DNA, 26 bp, Homo sapiens
ttcttcgcttgacggagccagcagtt

SEQ ID NO: 3489 - DNA, 24 bp, Homo sapiens
ccaggtgaggttggcagcaagcat

SEQ ID NO: 3490 - DNA, 23 bp, Homo sapiens
gatgggagacaggcaggtgagag

SEQ ID NO: 3491 - DNA, 26 bp, Homo sapiens
tccatctaaacatcaccgtgctccag

SEQ ID NO: 3492 - DNA, 23 bp, Homo sapiens
ggtggaagcagcaagggaagacc

SEQ ID NO: 3493 - DNA, 23 bp, Homo sapiens
cacctcttactcccctctccctt

SEQ ID NO: 3494 - DNA, 23 bp, Homo sapiens
ccaggtgaggttggcagcaagca

SEQ ID NO: 3495 - DNA, 25 bp, Homo sapiens
gaacgcggtagctttcttcagctaa

SEQ ID NO: 3496 - DNA, 24 bp, Homo sapiens
aagagtccttgccacctggaagcg

SEQ ID NO: 3497 - DNA, 26 bp, Homo sapiens
gcgtggatactttcctcttccgaact

SEQ ID NO: 3498 - DNA, 26 bp, Homo sapiens
ggaggagtaaggctgaaataacaggg

SEQ ID NO: 3499 - DNA, 26 bp, Homo sapiens
gtgctgaatgagtgcggagtccagaa

SEQ ID NO: 3500 - DNA, 25 bp, Homo sapiens
tattgtccattaggccccacaaggg

SEQ ID NO: 3501 - DNA, 23 bp, Homo sapiens
gggttctgtatgattaccgtcgt

SEQ ID NO: 3502 - DNA, 23 bp, Homo sapiens
ctgaaacgcagactggtgggtgc

SEQ ID NO: 3503 - DNA, 26 bp, Homo sapiens
gagccatagccatctgctggtttggt

SEQ ID NO: 3504 - DNA, 26 bp, Homo sapiens
gaccaaagcacctctgaaggacaaag

SEQ ID NO: 3505 - DNA, 23 bp, Homo sapiens
gttcacccctcagacacacaggt

SEQ ID NO: 3506 - DNA, 23 bp, Homo sapiens
ggtccagagcattttggtggtgc

SEQ ID NO: 3507 - DNA, 26 bp, Homo sapiens
accaaagcacctctgaaggacaaaga

SEQ ID NO: 3508 - DNA, 23 bp, Homo sapiens
gcctggtgtgaatcctgcctcca

SEQ ID NO: 3509 - DNA, 24 bp, Homo sapiens
attccccaccagtatgaggcgaat

SEQ ID NO: 3510 - DNA, 26 bp, Homo sapiens
gtggctcagaactttacctttgcctc

SEQ ID NO: 3511 - DNA, 26 bp, Homo sapiens
gtggctcagaactttacctttgcctc

SEQ ID NO: 3512 - DNA, 26 bp, Homo sapiens
gcttcagatgaggctccaccttgtta

SEQ ID NO: 3513 - DNA, 23 bp, Homo sapiens
agtaggactcgggcagggaggat

SEQ ID NO: 3514 - DNA, 26 bp, Homo sapiens
agaggtgctggagtgtggctgtgatt

SEQ ID NO: 3515 - DNA, 23 bp, Homo sapiens
gccagcgagacactcacacaact

SEQ ID NO: 3516 - DNA, 23 bp, Homo sapiens
gcactaagtcctgctaacatcag

SEQ ID NO: 3517 - DNA, 26 bp, Homo sapiens
aatgctcctcctttccttcagtcccc

SEQ ID NO: 3518 - DNA, 26 bp, Homo sapiens
gagaaaataatggtgggaagttaggg

SEQ ID NO: 3519 - DNA, 24 bp, Homo sapiens
taaagcctcgttattgatccggtt

SEQ ID NO: 3520 - DNA, 23 bp, Homo sapiens
ttctcctgtgacaactccctggg

SEQ ID NO: 3521 - DNA, 23 bp, Homo sapiens
ccaaggcaaagcacgaaggatgc

SEQ ID NO: 3522 - DNA, 23 bp, Homo sapiens
gcctttctttgcccagtattagc

SEQ ID NO: 3523 - DNA, 26 bp, Homo sapiens
cacttggagttgatgacttgcctgac

SEQ ID NO: 3524 - DNA, 23 bp, Homo sapiens
tccactgccctgcttctcaccaa

SEQ ID NO: 3525 - DNA, 23 bp, Homo sapiens
ccagcacagagtgtccgtttcca

SEQ ID NO: 3526 - DNA, 23 bp, Homo sapiens
cacagcagaggacctattcccag

SEQ ID NO: 3527 - DNA, 23 bp, Homo sapiens
ggctgggactgtgaaacctggaa

SEQ ID NO: 3528 - DNA, 23 bp, Homo sapiens
gacagatggcactacagaagggc

SEQ ID NO: 3529 - DNA, 26 bp, Homo sapiens
ctctgataacatcttccctctacacg

SEQ ID NO: 3530 - DNA, 26 bp, Homo sapiens
gaacctatgaaggaccactaaggagc

SEQ ID NO: 3531 - DNA, 26 bp, Homo sapiens
catttacttttacctctccttccagc

SEQ ID NO: 3532 - DNA, 26 bp, Homo sapiens
ttatccccttcctcaatcccacctcc

SEQ ID NO: 3533 - DNA, 24 bp, Homo sapiens
aaaacgaacaccgagaatgcagaa

SEQ ID NO: 3534 - DNA, 26 bp, Homo sapiens
tcacatcctccttgaactattctgta

SEQ ID NO: 3535 - DNA, 24 bp, Homo sapiens
gaatcataagcaaaagcactggtg

SEQ ID NO: 3536 - DNA, 24 bp, Homo sapiens
ggtggcgatccctaagaaggtgtg

SEQ ID NO: 3537 - DNA, 23 bp, Homo sapiens
tgggagggctgagaggtgaggaa

SEQ ID NO: 3538 - DNA, 26 bp, Homo sapiens
ctatcctggtcaaactgggacataca

SEQ ID NO: 3539 - DNA, 26 bp, Homo sapiens
gggaatagtttaggctttgggaaatc

SEQ ID NO: 3540 - DNA, 23 bp, Homo sapiens
agtgcgtctctgtgtctgggcta

SEQ ID NO: 3541 - DNA, 25 bp, Homo sapiens
gggaaccatctttctcttctgtcat

SEQ ID NO: 3542 - DNA, 23 bp, Homo sapiens
cccagtcagggaatgagagggta

SEQ ID NO: 3543 - DNA, 23 bp, Homo sapiens
cggcagggaagatgagaccacag

SEQ ID NO: 3544 - DNA, 23 bp, Homo sapiens
gcacaggaggagtctgaaagcag

SEQ ID NO: 3545 - DNA, 23 bp, Homo sapiens
ggcattcgaataatggtattaag

SEQ ID NO: 3546 - DNA, 23 bp, Homo sapiens
accaggtatggccatcggcgcta

SEQ ID NO: 3547 - DNA, 26 bp, Homo sapiens
gggaatggttggtggaggttacaagt

SEQ ID NO: 3548 - DNA, 26 bp, Homo sapiens
tcccaccaccatcattactgtcctga

SEQ ID NO: 3549 - DNA, 26 bp, Homo sapiens
ggtaactggcgaagcactcaataaac

SEQ ID NO: 3550 - DNA, 24 bp, Homo sapiens
gttaagtacccagatattcgctgg

SEQ ID NO: 3551 - DNA, 25 bp, Homo sapiens
ctcggggtctatggatgcccggtag

SEQ ID NO: 3552 - DNA, 23 bp, Homo sapiens
cccaggaatgaggaccacagtct

SEQ ID NO: 3553 - DNA, 26 bp, Homo sapiens
gtggtatcctaaaacctgacctcaac

SEQ ID NO: 3554 - DNA, 26 bp, Homo sapiens
gaccaagaatagtccaactccaacag

SEQ ID NO: 3555 - DNA, 23 bp, Homo sapiens
tgaagtggcatctctctcccgcc

SEQ ID NO: 3556 - DNA, 23 bp, Homo sapiens
aagggcagaggcaggacttggac

SEQ ID NO: 3557 - DNA, 26 bp, Homo sapiens
caaaagtgtcccttccctgctcccta

SEQ ID NO: 3558 - DNA, 23 bp, Homo sapiens
tcaccatctcctcaggcacaagg

SEQ ID NO: 3559 - DNA, 23 bp, Homo sapiens
gttgtctggtatattaacgtgcc

SEQ ID NO: 3560 - DNA, 26 bp, Homo sapiens
catcacctctctggtattcttcctgg

SEQ ID NO: 3561 - DNA, 26 bp, Homo sapiens
gagcctacaggatttagagtgggttg

SEQ ID NO: 3562 - DNA, 26 bp, Homo sapiens
ccatagaatacagcagcacccagcat

SEQ ID NO: 3563 - DNA, 23 bp, Homo sapiens
ttcacagaccagcatcgccccat

SEQ ID NO: 3564 - DNA, 23 bp, Homo sapiens
ccccaaccccatacagtgtgata

SEQ ID NO: 3565 - DNA, 23 bp, Homo sapiens
gggtgcctccaaatcgcatctcc

SEQ ID NO: 3566 - DNA, 26 bp, Homo sapiens
atgtctgacttagttctccagccagc

SEQ ID NO: 3567 - DNA, 60 bp, Homo sapiens; identical to SEQ ID NO: 1547

SEQ ID NO: 3568 - DNA, 60 bp, Homo sapiens; identical to SEQ ID NO: 1548

SEQ ID NO: 3569 - DNA, 60 bp, Homo sapiens; identical to SEQ ID NO: 1549

SEQ ID NO: 3570 - DNA, 60 bp, Homo sapiens; identical to SEQ ID NO: 1550

SEQ ID NO: 3571 - DNA, 60 bp, Homo sapiens; identical to SEQ ID NO: 1551

SEQ ID NO: 3572 - DNA, 60 bp, Homo sapiens; identical to SEQ ID NO: 1552

SEQ ID NO: 3573 - DNA, 60 bp, Homo sapiens; identical to SEQ ID NO: 1553

SEQ ID NO: 3574 - DNA, 60 bp, Homo sapiens; identical to SEQ ID NO: 1554

SEQ ID NO: 3575 - DNA, 60 bp, Homo sapiens; identical to SEQ ID NO: 1555

SEQ ID NO: 3576 - DNA, 60 bp, Homo sapiens; identical to SEQ ID NO: 1556

SEQ ID NO: 3577 - DNA, 60 bp, Homo sapiens; identical to SEQ ID NO: 1557

SEQ ID NO: 3578 - DNA, 60 bp, Homo sapiens; identical to SEQ ID NO: 1558

SEQ ID NO: 3579 - DNA, 60 bp, Homo sapiens; identical to SEQ ID NO: 1559

SEQ ID NO: 3580 - DNA, 60 bp, Homo sapiens; identical to SEQ ID NO: 1560

SEQ ID NO: 3581 - DNA, 60 bp, Homo sapiens; identical to SEQ ID NO: 1561

SEQ ID NO: 3582 - DNA, 60 bp, Homo sapiens; identical to SEQ ID NO: 1562

SEQ ID NO: 3583 - DNA, 60 bp, Homo sapiens; identical to SEQ ID NO: 1563

SEQ ID NO: 3584 - DNA, 60 bp, Homo sapiens; identical to SEQ ID NO: 1564

SEQ ID NO: 3585 - DNA, 60 bp, Homo sapiens; identical to SEQ ID NO: 1565

SEQ ID NO: 3586 - DNA, 60 bp, Homo sapiens; identical to SEQ ID NO: 1566

SEQ ID NO: 3587 - DNA, 60 bp, Homo sapiens; identical to SEQ ID NO: 1567

SEQ ID NO: 3588 - DNA, 60 bp, Homo sapiens; identical to SEQ ID NO: 1568

SEQ ID NO: 3589 - DNA, 60 bp, Homo sapiens; identical to SEQ ID NO: 1569

SEQ ID NO: 3590 - DNA, 60 bp, Homo sapiens; identical to SEQ ID NO: 1570

SEQ ID NO: 3591 - DNA, 60 bp, Homo sapiens; identical to SEQ ID NO: 1571

SEQ ID NO: 3592 - DNA, 60 bp, Homo sapiens; identical to SEQ ID NO: 1572

SEQ ID NO: 3593 - DNA, 60 bp, Homo sapiens; identical to SEQ ID NO: 1573

SEQ ID NO: 3594 - DNA, 60 bp, Homo sapiens; identical to SEQ ID NO: 1574

SEQ ID NO: 3595 - DNA, 60 bp, Homo sapiens; identical to SEQ ID NO: 1575

SEQ ID NO: 3596 - DNA, 60 bp, Homo sapiens; identical to SEQ ID NO: 1576

SEQ ID NO: 3597 - DNA, 60 bp, Homo sapiens; identical to SEQ ID NO: 1577

SEQ ID NO: 3598 - DNA, 60 bp, Homo sapiens; identical to SEQ ID NO: 1578

SEQ ID NO: 3599 - DNA, 60 bp, Homo sapiens; identical to SEQ ID NO: 1579

SEQ ID NO: 3600 - DNA, 60 bp, Homo sapiens; identical to SEQ ID NO: 1580

SEQ ID NO: 3601 - DNA, 60 bp, Homo sapiens; identical to SEQ ID NO: 1581

SEQ ID NO: 3602 - DNA, 60 bp, Homo sapiens; identical to SEQ ID NO: 1582

SEQ ID NO: 3603 - DNA, 60 bp, Homo sapiens; identical to SEQ ID NO: 1583

SEQ ID NO: 3604 - DNA, 60 bp, Homo sapiens; identical to SEQ ID NO: 1584

SEQ ID NO: 3605 - DNA, 60 bp, Homo sapiens; identical to SEQ ID NO: 1585

SEQ ID NO: 3606 - DNA, 60 bp, Homo sapiens; identical to SEQ ID NO: 1586

SEQ ID NO: 3607 - DNA, 60 bp, Homo sapiens; identical to SEQ ID NO: 1587

SEQ ID NO: 3608 - DNA, 60 bp, Homo sapiens; identical to SEQ ID NO: 1588

SEQ ID NO: 3609 - DNA, 60 bp, Homo sapiens; identical to SEQ ID NO: 1589

SEQ ID NO: 3610 - DNA, 60 bp, Homo sapiens; identical to SEQ ID NO: 1590

SEQ ID NO: 3611 - DNA, 60 bp, Homo sapiens; identical to SEQ ID NO: 1591

SEQ ID NO: 3612 - DNA, 60 bp, Homo sapiens; identical to SEQ ID NO: 1592

SEQ ID NO: 3613 - DNA, 60 bp, Homo sapiens; identical to SEQ ID NO: 1593

SEQ ID NO: 3614 - DNA, 60 bp, Homo sapiens; identical to SEQ ID NO: 1594

SEQ ID NO: 3615 - DNA, 60 bp, Homo sapiens; identical to SEQ ID NO: 1595

SEQ ID NO: 3616 - DNA, 60 bp, Homo sapiens; identical to SEQ ID NO: 1596

SEQ ID NO: 3617 - DNA, 23 bp, Homo sapiens
gccagcgagacactcacacaact

SEQ ID NO: 3618 - DNA, 23 bp, Homo sapiens
ggaactaaagggaagcgtccacg

SEQ ID NO: 3619 - DNA, 25 bp, Homo sapiens
gcgtataaaattagtaacggctaga

SEQ ID NO: 3620 - DNA, 23 bp, Homo sapiens
ccagcacacggcactttcttggg

SEQ ID NO: 3621 - DNA, 23 bp, Homo sapiens
cagttcgtgttctgacggcaggc

SEQ ID NO: 3622 - DNA, 26 bp, Homo sapiens
ttcttcgcttgacggagccagcagtt

SEQ ID NO: 3623 - DNA, 23 bp, Homo sapiens
ccttgtgggacccctatcttctc

SEQ ID NO: 3624 - DNA, 26 bp, Homo sapiens
gtcactactgaggactgaaaatgcgg

SEQ ID NO: 3625 - DNA, 23 bp, Homo sapiens
cagcccacacacgagatacacac

SEQ ID NO: 3626 - DNA, 23 bp, Homo sapiens
tcccaaggaactatggaggcagg

SEQ ID NO: 3627 - DNA, 24 bp, Homo sapiens
tatgagccgggttcatctttgcgc

SEQ ID NO: 3628 - DNA, 25 bp, Homo sapiens
ataaatgtgtcccaggataggaggc

SEQ ID NO: 3629 - DNA, 23 bp, Homo sapiens
cacctggaaagaggaagtagggc

SEQ ID NO: 3630 - DNA, 23 bp, Homo sapiens
gaggagaatggacaggctgggtc

SEQ ID NO: 3631 - DNA, 24 bp, Homo sapiens
acggagcgtatgtgaaaagaagta

SEQ ID NO: 3632 - DNA, 25 bp, Homo sapiens
ataaatgtgtcccaggataggaggc

SEQ ID NO: 3633 - DNA, 25 bp, Homo sapiens
gttatagtaccgtcgttttaggtgc

SEQ ID NO: 3634 - DNA, 23 bp, Homo sapiens
acttctatgttacaccctcggtc

SEQ ID NO: 3635 - DNA, 26 bp, Homo sapiens
cagtctgggcaacatagcaggagtgt

SEQ ID NO: 3636 - DNA, 23 bp, Homo sapiens
caggtgaggttggcagcaagcat

SEQ ID NO: 3637 - DNA, 26 bp, Homo sapiens
ttacggctttggtgctctcggacaca

SEQ ID NO: 3638 - DNA, 23 bp, Homo sapiens
aaggcaggagccaacccagcaca

SEQ ID NO: 3639 - DNA, 23 bp, Homo sapiens
acttcccagaggctcctgaaagc

SEQ ID NO: 3640 - DNA, 26 bp, Homo sapiens
ctcgtagtaatggagtttgtaacggc

SEQ ID NO: 3641 - DNA, 23 bp, Homo sapiens
tctcctgctccccactccacagt

SEQ ID NO: 3642 - DNA, 26 bp, Homo sapiens
ggtggaagcagcaagggaagaccaat

SEQ ID NO: 3643 - DNA, 23 bp, Homo sapiens
aagccgtgggactcgcaggtgaa

SEQ ID NO: 3644 - DNA, 23 bp, Homo sapiens
cacctctcctccgtcccaccatt

SEQ ID NO: 3645 - DNA, 26 bp, Homo sapiens
ctgagactgtgaccctgaagaatgac

SEQ ID NO: 3646 - DNA, 26 bp, Homo sapiens
gctcgtaactcaggttgtgaatcttc

SEQ ID NO: 3647 - DNA, 23 bp, Homo sapiens
agcaaggtgaggtgacagggagc

SEQ ID NO: 3648 - DNA, 23 bp, Homo sapiens
gacgcagtctcacacactttggg

SEQ ID NO: 3649 - DNA, 25 bp, Homo sapiens
gaatccatacccactatccccaacc

SEQ ID NO: 3650 - DNA, 23 bp, Homo sapiens
gggtgttgcgagatgagcctgat

SEQ ID NO: 3651 - DNA, 26 bp, Homo sapiens
aggcgacagggttcgggctttattct

SEQ ID NO: 3652 - DNA, 23 bp, Homo sapiens
tggcagagggagagggtcagaga

SEQ ID NO: 3653 - DNA, 25 bp, Homo sapiens
gtgttaatcgtccggggaccaattt

SEQ ID NO: 3654 - DNA, 23 bp, Homo sapiens
gagttactcgttacggtgcttcg

SEQ ID NO: 3655 - DNA, 26 bp, Homo sapiens
ggacgctgaatgttgtcaagtgtttt

SEQ ID NO: 3656 - DNA, 23 bp, Homo sapiens
gtgggcgtctcgtagtaatggag

SEQ ID NO: 3657 - DNA, 23 bp, Homo sapiens
gggagtggaggagtaaggctgaa

SEQ ID NO: 3658 - DNA, 23 bp, Homo sapiens
taccgtgctgtgtgacctcagac

SEQ ID NO: 3659 - DNA, 26 bp, Homo sapiens
tcccatttccccattctggtcctaag

SEQ ID NO: 3660 - DNA, 26 bp, Homo sapiens
ggaggtgacaacagtatcataaagtg

SEQ ID NO: 3661 - DNA, 23 bp, Homo sapiens
gcgagaacggaggctaagttgat

SEQ ID NO: 3662 - DNA, 25 bp, Homo sapiens
ctgaatccctaggtcatgggtgtgg

SEQ ID NO: 3663 - DNA, 25 bp, Homo sapiens
tgtatactcaaagccatcataagtg

SEQ ID NO: 3664 - DNA, 24 bp, Homo sapiens
gtatatacgataagtgatcaattg

SEQ ID NO: 3665 - DNA, 24 bp, Homo sapiens
aaatcccccagggctagctcgctt

SEQ ID NO: 3666 - DNA, 23 bp, Homo sapiens
gctttggtgctctcggacacagc

SEQ ID NO: 3667 - DNA, 23 bp, Homo sapiens
cctccctgcttcggcttttccca

SEQ ID NO: 3668 - DNA, 23 bp, Homo sapiens
acctgccacacctgagacccaga

SEQ ID NO: 3669 - DNA, 24 bp, Homo sapiens
ggaccgggagtccgatagacctac

SEQ ID NO: 3670 - DNA, 23 bp, Homo sapiens
tcaccatctcctcaggcacaagg

SEQ ID NO: 3671 - DNA, 23 bp, Homo sapiens
ggaggcagtcattctggtgttcc

SEQ ID NO: 3672 - DNA, 26 bp, Homo sapiens
gcgaacaggactggagaaaagtatca

SEQ ID NO: 3673 - DNA, 23 bp, Homo sapiens
tgaagtggcatctctctcccgcc

SEQ ID NO: 3674 - DNA, 26 bp, Homo sapiens
ctgtttgttgaatggactctggaccc

SEQ ID NO: 3675 - DNA, 23 bp, Homo sapiens
ccagggctgactgacaccaaagc

SEQ ID NO: 3676 - DNA, 23 bp, Homo sapiens
tgaggaaggaggtgccaaccgca

SEQ ID NO: 3677 - DNA, 24 bp, Homo sapiens
ccacttcggagaaatgaggcgcaa

SEQ ID NO: 3678 - DNA, 26 bp, Homo sapiens
gcttgggtccctgaacactgtcattc

SEQ ID NO: 3679 - DNA, 23 bp, Homo sapiens
ggcaggctcaaagcaggcattgg

SEQ ID NO: 3680 - DNA, 23 bp, Homo sapiens
ccccttgtccagagtttccacac

SEQ ID NO: 3681 - DNA, 23 bp, Homo sapiens
aagcggtacaaaattgtaccgta

SEQ ID NO: 3682 - DNA, 26 bp, Homo sapiens
aggtgttgttgagggtgggtaggaga

SEQ ID NO: 3683 - DNA, 25 bp, Homo sapiens
cattagtaacattttggcacggtgt

SEQ ID NO: 3684 - DNA, 24 bp, Homo sapiens
tattatgggtgtgtatatcgccgt

SEQ ID NO: 3685 - DNA, 26 bp, Homo sapiens
ttagattaccacaacatcagcctggg

SEQ ID NO: 3686 - DNA, 23 bp, Homo sapiens
tgtcctctggctctgtttgggcg

SEQ ID NO: 3687 - DNA, 26 bp, Homo sapiens
atacttcccttttcccacctctggat

SEQ ID NO: 3688 - DNA, 23 bp, Homo sapiens
ttacaggtttgaggtgcccgtcg

SEQ ID NO: 3689 - DNA, 23 bp, Homo sapiens
ggcgttcttggctgacaccctct

SEQ ID NO: 3690 - DNA, 26 bp, Homo sapiens
gagatggagcagaacaggaagttggg

SEQ ID NO: 3691 - DNA, 23 bp, Homo sapiens
tgcgagggcaaacacagagtgag

SEQ ID NO: 3692 - DNA, 26 bp, Homo sapiens
gcctctccctcattcaaaagaaagaa

SEQ ID NO: 3693 - DNA, 23 bp, Homo sapiens
ctggtcgtcacctcttccaacct

SEQ ID NO: 3694 - DNA, 23 bp, Homo sapiens
cactttgggagactgagagcgga

SEQ ID NO: 3695 - DNA, 26 bp, Homo sapiens
attgttctgagcactgaggacacagc

SEQ ID NO: 3696 - DNA, 25 bp, Homo sapiens
agatgagcggcaggtttggctgaga

SEQ ID NO: 3697 - DNA, 23 bp, Homo sapiens
cacacagagtaggcaggcggata

SEQ ID NO: 3698 - DNA, 25 bp, Homo sapiens
cccagtcagggaatgagagggtatg

SEQ ID NO: 3699 - DNA, 26 bp, Homo sapiens
gggtaagaaaagtgtgtctcattgat

SEQ ID NO: 3700 - DNA, 23 bp, Homo sapiens
tgaagtggcatctctctcccgcc

SEQ ID NO: 3701 - DNA, 26 bp, Homo sapiens
gaagaggactgtagaaggagacaaga

SEQ ID NO: 3702 - DNA, 23 bp, Homo sapiens
caaggagatgcccaggctaatgg

SEQ ID NO: 3703 - DNA, 24 bp, Homo sapiens
tcttcgttaagaaatatttccgtt

SEQ ID NO: 3704 - DNA, 25 bp, Homo sapiens
tccacgaccgccacaggaaaggtac

SEQ ID NO: 3705 - DNA, 26 bp, Homo sapiens
ggttttcccctggagttggactgttc

SEQ ID NO: 3706 - DNA, 23 bp, Homo sapiens
gctgaccttgggtgtggtgtcca

SEQ ID NO: 3707 - DNA, 23 bp, Homo sapiens
ctgccactttgagactgcccctc

SEQ ID NO: 3708 - DNA, 23 bp, Homo sapiens
ccgtcttcagccctcagtgtagg

SEQ ID NO: 3709 - DNA, 26 bp, Homo sapiens
gagagattctgttattagtgctttgc

SEQ ID NO: 3710 - DNA, 26 bp, Homo sapiens
aaaccctacaagtgtgaccgctgcca

SEQ ID NO: 3711 - DNA, 24 bp, Homo sapiens
ccccacgccaccatagatgtgcgc

SEQ ID NO: 3712 - DNA, 24 bp, Homo sapiens
tccctaaccgtaaaaacatgcagg

SEQ ID NO: 3713 - DNA, 24 bp, Homo sapiens
catagtgctagtccattccataac

SEQ ID NO: 3714 - DNA, 23 bp, Homo sapiens
agccacacctgcgcccggaaccc

SEQ ID NO: 3715 - DNA, 25 bp, Homo sapiens
ttgtggtcgacacacatgataagtt

SEQ ID NO: 3716 - DNA, 23 bp, Homo sapiens
gcggtggtttatgcgtccttagc

SEQ ID NO: 3717 - DNA, 60 bp, Homo sapiens; identical to SEQ ID NO: 1597

SEQ ID NO: 3718 - DNA, 60 bp, Homo sapiens; identical to SEQ ID NO: 1598

SEQ ID NO: 3719 - DNA, 60 bp, Homo sapiens; identical to SEQ ID NO: 1599

SEQ ID NO: 3720 - DNA, 60 bp, Homo sapiens; identical to SEQ ID NO: 1600

SEQ ID NO: 3721 - DNA, 60 bp, Homo sapiens; identical to SEQ ID NO: 1601

SEQ ID NO: 3722 - DNA, 60 bp, Homo sapiens; identical to SEQ ID NO: 1602

SEQ ID NO: 3723 - DNA, 60 bp, Homo sapiens; identical to SEQ ID NO: 1603

SEQ ID NO: 3724 - DNA, 60 bp, Homo sapiens; identical to SEQ ID NO: 1604

SEQ ID NO: 3725 - DNA, 60 bp, Homo sapiens; identical to SEQ ID NO: 1605

SEQ ID NO: 3726 - DNA, 60 bp, Homo sapiens; identical to SEQ ID NO: 1606

SEQ ID NO: 3727 - DNA, 60 bp, Homo sapiens; identical to SEQ ID NO: 1607

SEQ ID NO: 3728 - DNA, 60 bp, Homo sapiens; identical to SEQ ID NO: 1608

SEQ ID NO: 3729 - DNA, 60 bp, Homo sapiens; identical to SEQ ID NO: 1609

SEQ ID NO: 3730 - DNA, 60 bp, Homo sapiens; identical to SEQ ID NO: 1610

SEQ ID NO: 3731 - DNA, 60 bp, Homo sapiens; identical to SEQ ID NO: 1611

SEQ ID NO: 3732 - DNA, 60 bp, Homo sapiens; identical to SEQ ID NO: 1612

SEQ ID NO: 3733 - DNA, 60 bp, Homo sapiens; identical to SEQ ID NO: 1613

SEQ ID NO: 3734 - DNA, 60 bp, Homo sapiens; identical to SEQ ID NO: 1614

SEQ ID NO: 3735 - DNA, 60 bp, Homo sapiens; identical to SEQ ID NO: 1615

SEQ ID NO: 3736 - DNA, 60 bp, Homo sapiens; identical to SEQ ID NO: 1616

SEQ ID NO: 3737 - DNA, 60 bp, Homo sapiens; identical to SEQ ID NO: 1617

SEQ ID NO: 3738 - DNA, 60 bp, Homo sapiens; identical to SEQ ID NO: 1618

SEQ ID NO: 3739 - DNA, 60 bp, Homo sapiens; identical to SEQ ID NO: 1619

SEQ ID NO: 3740 - DNA, 60 bp, Homo sapiens; identical to SEQ ID NO: 1620

SEQ ID NO: 3741 - DNA, 60 bp, Homo sapiens; identical to SEQ ID NO: 1621

SEQ ID NO: 3742 - DNA, 60 bp, Homo sapiens; identical to SEQ ID NO: 1622

SEQ ID NO: 3743 - DNA, 60 bp, Homo sapiens; identical to SEQ ID NO: 1623

SEQ ID NO: 3744 - DNA, 60 bp, Homo sapiens; identical to SEQ ID NO: 1624

SEQ ID NO: 3745 - DNA, 60 bp, Homo sapiens; identical to SEQ ID NO: 1625

SEQ ID NO: 3746 - DNA, 60 bp, Homo sapiens; identical to SEQ ID NO: 1626

SEQ ID NO: 3747 - DNA, 60 bp, Homo sapiens; identical to SEQ ID NO: 1627

SEQ ID NO: 3748 - DNA, 60 bp, Homo sapiens; identical to SEQ ID NO: 1628

SEQ ID NO: 3749 - DNA, 60 bp, Homo sapiens; identical to SEQ ID NO: 1629

SEQ ID NO: 3750 - DNA, 60 bp, Homo sapiens; identical to SEQ ID NO: 1630

SEQ ID NO: 3751 - DNA, 60 bp, Homo sapiens; identical to SEQ ID NO: 1631

SEQ ID NO: 3752 - DNA, 60 bp, Homo sapiens; identical to SEQ ID NO: 1632

SEQ ID NO: 3753 - DNA, 60 bp, Homo sapiens; identical to SEQ ID NO: 1633

SEQ ID NO: 3754 - DNA, 24 bp, Homo sapiens
cccctagccgtttaatagtataca

SEQ ID NO: 3755 - DNA, 25 bp, Homo sapiens
ataaatgtgtcccaggataggaggc

SEQ ID NO: 3756 - DNA, 23 bp, Homo sapiens
tcccatttaggagagtgcctggc

SEQ ID NO: 3757 - DNA, 26 bp, Homo sapiens
ggtaactggcgaagcactcaataaac

SEQ ID NO: 3758 - DNA, 23 bp, Homo sapiens
ccacacacgagatacacacaccc

SEQ ID NO: 3759 - DNA, 23 bp, Homo sapiens
actcccgccttcgtgcccaaata

SEQ ID NO: 3760 - DNA, 24 bp, Homo sapiens
tgaacccactgctaataccaaccg

SEQ ID NO: 3761 - DNA, 23 bp, Homo sapiens
tcagtctccatacaccttggagt

SEQ ID NO: 3762 - DNA, 26 bp, Homo sapiens
acgagcaaaggtgagaaagcaaatgc

SEQ ID NO: 3763 - DNA, 25 bp, Homo sapiens
gcatgactggcaacggctcgccctg

SEQ ID NO: 3764 - DNA, 24 bp, Homo sapiens
aagtaaatcctcggagctgagacg

SEQ ID NO: 3765 - DNA, 23 bp, Homo sapiens
gttcccgccttcctccatcttgc

SEQ ID NO: 3766 - DNA, 23 bp, Homo sapiens
ttggaggtggaggtctgccaggt

SEQ ID NO: 3767 - DNA, 23 bp, Homo sapiens
tcagcagggcaggaacacagtgg

SEQ ID NO: 3768 - DNA, 26 bp, Homo sapiens
cacctgttgtaatcctggcactctgg

SEQ ID NO: 3769 - DNA, 23 bp, Homo sapiens
ccaggtgaggttggcagcaagca

SEQ ID NO: 3770 - DNA, 25 bp, Homo sapiens
aaacgttacccaggccactactcat

SEQ ID NO: 3771 - DNA, 23 bp, Homo sapiens
acttagtttctcacgttgtcaca

SEQ ID NO: 3772 - DNA, 23 bp, Homo sapiens
gggagtggaggagtaaggctgaa

SEQ ID NO: 3773 - DNA, 24 bp, Homo sapiens
tgtagtcttagaacccccgtacgt

SEQ ID NO: 3774 - DNA, 23 bp, Homo sapiens
ggtcacagaaggaagcctactgc

SEQ ID NO: 3775 - DNA, 24 bp, Homo sapiens
aatatccatcccccggaacttgct

SEQ ID NO: 3776 - DNA, 23 bp, Homo sapiens
agttttgttgtttcttttcttca

SEQ ID NO: 3777 - DNA, 25 bp, Homo sapiens
gtccgtgcccagtgctttggcgtcg

SEQ ID NO: 3778 - DNA, 23 bp, Homo sapiens
gcagacaggcagaaggacagaac

SEQ ID NO: 3779 - DNA, 26 bp, Homo sapiens
ggtggaagcagcaagggaagaccaat

SEQ ID NO: 3780 - DNA, 23 bp, Homo sapiens
aatccttcctgcccctgtgccag

SEQ ID NO: 3781 - DNA, 23 bp, Homo sapiens
gctttggtgctctcggacacagc

SEQ ID NO: 3782 - DNA, 26 bp, Homo sapiens
gaccaaagcacctctgaaggacaaag

SEQ ID NO: 3783 - DNA, 25 bp, Homo sapiens
ttaccgactcatgacggcgattctc

SEQ ID NO: 3784 - DNA, 26 bp, Homo sapiens
cttatcgtccgccttcattcctatgc

SEQ ID NO: 3785 - DNA, 26 bp, Homo sapiens
ggtggaagcagcaagggaagaccaat

SEQ ID NO: 3786 - DNA, 25 bp, Homo sapiens
gattagcgctggaccttgttgtcca

SEQ ID NO: 3787 - DNA, 26 bp, Homo sapiens
ctaaacaggttcagacatagccccta

SEQ ID NO: 3788 - DNA, 25 bp, Homo sapiens
ctatattgtgtgatgtcagcatgtc

SEQ ID NO: 3789 - DNA, 25 bp, Homo sapiens
tctcacaaggggtagggtcactcca

SEQ ID NO: 3790 - DNA, 23 bp, Homo sapiens
gatgggagacaggcaggtgagag

SEQ ID NO: 3791 - DNA, 25 bp, Homo sapiens
tttttcggcctagataagattccac

SEQ ID NO: 3792 - DNA, 26 bp, Homo sapiens
tgagggcactgctcttggattcacca

SEQ ID NO: 3793 - DNA, 23 bp, Homo sapiens
gtgctctttcactctcctccgcc

SEQ ID NO: 3794 - DNA, 26 bp, Homo sapiens
acccagccatctgcctctcagtgaat

SEQ ID NO: 3795 - DNA, 23 bp, Homo sapiens
ttgctggcagagactcgcctgga

SEQ ID NO: 3796 - DNA, 23 bp, Homo sapiens
cagccctactcaccctccttgtc

SEQ ID NO: 3797 - DNA, 24 bp, Homo sapiens
cagtgcgggggtgggtcggccgat

SEQ ID NO: 3798 - DNA, 25 bp, Homo sapiens
cctttgtctaggagctgttgacatg

SEQ ID NO: 3799 - DNA, 25 bp, Homo sapiens
cccctcagaactcaggagaaatcat

SEQ ID NO: 3800 - DNA, 25 bp, Homo sapiens
gtagtagacgatgtgcgcagtcgga

SEQ ID NO: 3801 - DNA, 25 bp, Homo sapiens
ataagcagcctcaactgccttccga

SEQ ID NO: 3802 - DNA, 23 bp, Homo sapiens
aggctccaggctctgagatttgg

SEQ ID NO: 3803 - DNA, 23 bp, Homo sapiens
tccctaccctcctatgtgctcct

SEQ ID NO: 3804 - DNA, 23 bp, Homo sapiens
ctgccctggaagcctatgtgact

SEQ ID NO: 3805 - DNA, 26 bp, Homo sapiens
gatacacagaccttgaggcaacaatg

SEQ ID NO: 3806 - DNA, 23 bp, Homo sapiens
ggagtgggaaaggaagcgacaga

SEQ ID NO: 3807 - DNA, 25 bp, Homo sapiens
caaaattccggctctcgcatgggtt

SEQ ID NO: 3808 - DNA, 25 bp, Homo sapiens
tttacagtggacgcttccggaaaac

SEQ ID NO: 3809 - DNA, 23 bp, Homo sapiens
cctccatttccccaaccgcctga

SEQ ID NO: 3810 - DNA, 25 bp, Homo sapiens
gagtacccctaatgccgggtacagt

SEQ ID NO: 3811 - DNA, 23 bp, Homo sapiens
cgcagtccgatgctctatctccc

SEQ ID NO: 3812 - DNA, 24 bp, Homo sapiens
gaaagttgagttccaggaccttga

SEQ ID NO: 3813 - DNA, 24 bp, Homo sapiens
gcactctgttgggattgccaggga

SEQ ID NO: 3814 - DNA, 23 bp, Homo sapiens
cctttaagggcccaagctgggtc

SEQ ID NO: 3815 - DNA, 23 bp, Homo sapiens
gctggtgcttgggaaggtaggag

SEQ ID NO: 3816 - DNA, 26 bp, Homo sapiens
ctctgataacatcttccctctacacg

SEQ ID NO: 3817 - DNA, 23 bp, Homo sapiens
atgtgggaagcctggcactgatg

SEQ ID NO: 3818 - DNA, 23 bp, Homo sapiens
gcctgaacgagggacctatcaac

SEQ ID NO: 3819 - DNA, 26 bp, Homo sapiens
gccttttgtgccatccctttcctaag

SEQ ID NO: 3820 - DNA, 25 bp, Homo sapiens
aggaacctatacctatgctgctctg

SEQ ID NO: 3821 - DNA, 26 bp, Homo sapiens
cccagacatcctaccaccagtaaaac

SEQ ID NO: 3822 - DNA, 26 bp, Homo sapiens
gcataatcttggactttcgtttgcca

SEQ ID NO: 3823 - DNA, 25 bp, Homo sapiens
cttccatgctgggtaccaatatgaa

SEQ ID NO: 3824 - DNA, 26 bp, Homo sapiens
tggacagggcaggcaataacagggat

SEQ ID NO: 3825 - DNA, 23 bp, Homo sapiens
gtggtcccgccgtttgcaagtgt

SEQ ID NO: 3826 - DNA, 23 bp, Homo sapiens
gcatcatcgagccccctattcac

SEQ ID NO: 3827 - DNA, 23 bp, Homo sapiens
ggctccccaggtctttactaacc

SEQ ID NO: 3828 - DNA, 28 bp, Homo sapiens
cggagagagggacgcaggaatggaaggg

SEQ ID NO: 3829 - DNA, 28 bp, Homo sapiens
gaagcccagggaggtgtgtgaggactgc

SEQ ID NO: 3830 - DNA, 23 bp, Homo sapiens
caggtcccctcccagacaccagc

SEQ ID NO: 3831 - DNA, 27 bp, Homo sapiens
gcacagcaaggtgaggtgacagggagc

SEQ ID NO: 3832 - DNA, 28 bp, Homo sapiens
ggactggacacttgagagggcactgggc

SEQ ID NO: 3833 - DNA, 28 bp, Homo sapiens
ggactggacacttgagagggcactgggc

SEQ ID NO: 3834 - DNA, 28 bp, Homo sapiens
ctctgaaggtccagtcacagggaacttg

SEQ ID NO: 3835 - DNA, 28 bp, Homo sapiens
gtggtgggcagtggcggcaacgacaaag

SEQ ID NO: 3836 - DNA, 28 bp, Homo sapiens
ggtggacctgacacggatgcctgctgac

SEQ ID NO: 3837 - DNA, 25 bp, Homo sapiens
cctctttggtgtgggctccgacctc

SEQ ID NO: 3838 - DNA, 28 bp, Homo sapiens
ggctcactgacctcccaggctcaagcga

SEQ ID NO: 3839 - DNA, 28 bp, Homo sapiens
caggaagcaggcaacagcccgatgacac

SEQ ID NO: 3840 - DNA, 27 bp, Homo sapiens
cgaacccaccacacacacacaccagac

SEQ ID NO: 3841 - DNA, 23 bp, Homo sapiens
ctcctcctgccagcctcctgagc

SEQ ID NO: 3842 - DNA, 28 bp, Homo sapiens
agaggaggcgagacgaagaggtgggagc

SEQ ID NO: 3843 - DNA, 28 bp, Homo sapiens
ttaggcttccttgcgggtgctcctcagg

SEQ ID NO: 3844 - DNA, 23 bp, Homo sapiens
aaggcagcagccagagccccagc

SEQ ID NO: 3845 - DNA, 23 bp, Homo sapiens
cacaggtgcccagcccagtggac

SEQ ID NO: 3846 - DNA, 28 bp, Homo sapiens
tcaaggctgctcatacaacatccattct

SEQ ID NO: 3847 - DNA, 26 bp, Homo sapiens
ggagcctggaaaacagaggatgcccc

SEQ ID NO: 3848 - DNA, 24 bp, Homo sapiens
cctcgtgaatccgcctgccttggc

SEQ ID NO: 3849 - DNA, 28 bp, Homo sapiens
ccctgggcactactgactcctgggctgt

SEQ ID NO: 3850 - DNA, 28 bp, Homo sapiens
ctcagggatgcggttgaatagtccgtcc

SEQ ID NO: 3851 - DNA, 27 bp, Homo sapiens
gtgagtgttcagcaggaagcggcagcg

SEQ ID NO: 3852 - DNA, 34 bp, Homo sapiens; identical to SEQ ID NO: 1896

SEQ ID NO: 3853 - DNA, 32 bp, Homo sapiens; identical to SEQ ID NO: 1897

SEQ ID NO: 3854 - DNA, 33 bp, Homo sapiens; identical to SEQ ID NO: 1898

SEQ ID NO: 3855 - DNA, 33 bp, Homo sapiens; identical to SEQ ID NO: 1899

SEQ ID NO: 3856 - DNA, 33 bp, Homo sapiens; identical to SEQ ID NO: 1900

SEQ ID NO: 3857 - DNA, 34 bp, Homo sapiens; identical to SEQ ID NO: 1901

SEQ ID NO: 3858 - DNA, 34 bp, Homo sapiens; identical to SEQ ID NO: 1902

SEQ ID NO: 3859 - DNA, 26 bp, Homo sapiens
ggggcatcctctgttttccaggctcc

SEQ ID NO: 3860 - DNA, 32 bp, Homo sapiens; identical to SEQ ID NO: 1904

SEQ ID NO: 3861 - DNA, 34 bp, Homo sapiens; identical to SEQ ID NO: 1905

SEQ ID NO: 3862 - DNA, 32 bp, Homo sapiens; identical to SEQ ID NO: 1906

SEQ ID NO: 3863 - DNA, 34 bp, Homo sapiens; identical to SEQ ID NO: 1907

SEQ ID NO: 3864 - DNA, 34 bp, Homo sapiens; identical to SEQ ID NO: 1908

SEQ ID NO: 3865 - DNA, 34 bp, Homo sapiens; identical to SEQ ID NO: 1909

SEQ ID NO: 3866 - DNA, 33 bp, Homo sapiens; identical to SEQ ID NO: 1910

SEQ ID NO: 3867 - DNA, 34 bp, Homo sapiens; identical to SEQ ID NO: 1911

SEQ ID NO: 3868 - DNA, 32 bp, Homo sapiens; identical to SEQ ID NO: 1912

SEQ ID NO: 3869 - DNA, 34 bp, Homo sapiens; identical to SEQ ID NO: 1913

SEQ ID NO: 3870 - DNA, 32 bp, Homo sapiens; identical to SEQ ID NO: 1914

SEQ ID NO: 3871 - DNA, 30 bp, Homo sapiens; identical to SEQ ID NO: 1915

SEQ ID NO: 3872 - DNA, 32 bp, Homo sapiens; identical to SEQ ID NO: 1916

SEQ ID NO: 3873 - DNA, 34 bp, Homo sapiens; identical to SEQ ID NO: 1917

SEQ ID NO: 3874 - DNA, 32 bp, Homo sapiens; identical to SEQ ID NO: 1918

SEQ ID NO: 3875 - DNA, 32 bp, Homo sapiens; identical to SEQ ID NO: 1919

SEQ ID NO: 3876 - DNA, 60 bp, Homo sapiens; identical to SEQ ID NO: 736

SEQ ID NO: 3877 - DNA, 60 bp, Homo sapiens
gaatgagatcatgtattttgtgggaacatcgaactcctgaccctcatgtgatccatccac

SEQ ID NO: 3878 - DNA, 60 bp, Homo sapiens; identical to SEQ ID NO: 5

SEQ ID NO: 3879 - DNA, 60 bp, Homo sapiens; identical to SEQ ID NO: 50

SEQ ID NO: 3880 - DNA, 60 bp, Homo sapiens; identical to SEQ ID NO: 743

SEQ ID NO: 3881 - DNA, 60 bp, Homo sapiens
taatttgcacttccctgatggctaattgtcgatctcttgaccttatgatctgcccacctc

SEQ ID NO: 3882 - DNA, 60 bp, Homo sapiens
gaaattaaaataccaaaagaattcaagatcgaactcctgacctccagtaaaccacccgcc

SEQ ID NO: 3883 - DNA, 60 bp, Homo sapiens
agaccctgtcagttaccacatcttagcttcgatctcctgacctcgtaatctacctgcctc

SEQ ID NO: 3884 - DNA, 60 bp, Homo sapiens
atatgtcaaattgtttaatgcttaaacatcgatctcctgaccttgtgaacctcccacctc

SEQ ID NO: 3885 - DNA, 60 bp, Homo sapiens; identical to SEQ ID NO: 749

SEQ ID NO: 3886 - DNA, 60 bp, Homo sapiens; identical to SEQ ID NO: 739

SEQ ID NO: 3887 - DNA, 60 bp, Homo sapiens
gccttccatgcatctttttttttttttttcgaactcctgacctaaggtgatccaaaccgc

SEQ ID NO: 3888 - DNA, 60 bp, Homo sapiens
gacaaaaaagtagagagacatacaggaatcgaactcctgacctctagtaatccacccacc

SEQ ID NO: 3889 - DNA, 60 bp, Homo sapiens
agtactcctaaagatgggggaatgcaaatcgaactcctgaccccatgtgatccacttgcc

SEQ ID NO: 3890 - DNA, 60 bp, Homo sapiens
aattttagatcaatatccctgatgaacatcgaactcctgacctcaagtgattttcccgcc

SEQ ID NO: 3891 - DNA, 60 bp, Homo sapiens; identical to SEQ ID NO: 35

SEQ ID NO: 3892 - DNA, 60 bp, Homo sapiens; identical to SEQ ID NO: 36

SEQ ID NO: 3893 - DNA, 60 bp, Homo sapiens
ctgcagtgtaggtatctacaaagcagtatcgatctcctgacctcatcatcctcctgcctc

SEQ ID NO: 3894 - DNA, 60 bp, Homo sapiens; identical to SEQ ID NO: 454

SEQ ID NO: 3895 - DNA, 60 bp, Homo sapiens; identical to SEQ ID NO: 455

SEQ ID NO: 3896 - DNA, 60 bp, Homo sapiens; identical to SEQ ID NO: 754

SEQ ID NO: 3897 - DNA, 60 bp, Homo sapiens; identical to SEQ ID NO: 91

SEQ ID NO: 3898 - DNA, 60 bp, Homo sapiens
aaagcctcattcgctggtaaattggaagtcgaactcctgacctcaggagatccatctgcc

SEQ ID NO: 3899 - DNA, 60 bp, Homo sapiens; identical to SEQ ID NO: 750

SEQ ID NO: 3900 - DNA, 60 bp, Homo sapiens; identical to SEQ ID NO: 45

SEQ ID NO: 3901 - DNA, 60 bp, Homo sapiens
tatttattctacatatcctgtgtgaagttcgatctcctgacctcgtgatatacccacctc

SEQ ID NO: 3902 - DNA, 60 bp, Homo sapiens
ccagttacaactgagtcactaaggctagtcgaactcctgacctcaagtaatatccccgcc

SEQ ID NO: 3903 - DNA, 60 bp, Homo sapiens
tcacaaataaaattacataggaatcaactcgagaccagcctccaacatggcaaagccctg

SEQ ID NO: 3904 - DNA, 60 bp, Homo sapiens; identical to SEQ ID NO: 458

SEQ ID NO: 3905 - DNA, 60 bp, Homo sapiens
ctgattcatgttacaacatgaatgaacctcgagactagcctgaccaacgtagtgaaacca

SEQ ID NO: 3906 - DNA, 60 bp, Homo sapiens
aaggtgttgaaagagaacaccctaaaaatcgaactcctgacctcaggtggaggtctgcca

SEQ ID NO: 3907 - DNA, 60 bp, Homo sapiens
cacaagagaaagcaagaaagatttaaaatcgaactcctgaccgggggtgatccatcagcc

SEQ ID NO: 3908 - DNA, 60 bp, Homo sapiens
tatataaatgtccttgtgatctacagcttcgaactcctgacctcaacaattcacccatct

SEQ ID NO: 3909 - DNA, 60 bp, Homo sapiens
ccaggctgaaatttaatgtcataggaaatcgaactcctgacctcaggtcacccatctgcc

SEQ ID NO: 3910 - DNA, 60 bp, Homo sapiens
aaaataatatcactatatgatggtagattcgaactcctgacctcaaccaattcacctgcc

SEQ ID NO: 3911 - DNA, 60 bp, Homo sapiens
ggtggacgaatttcttaagctcaggagttcgacacatacactcttccaagactaaaccag

SEQ ID NO: 3912 - DNA, 60 bp, Homo sapiens
aatcaatattcaattctaagaacgcaaatcgaactcctgaccccaaatgattcaccagcc

SEQ ID NO: 3913 - DNA, 60 bp, Homo sapiens
atcttttactttcttttcttttagaacctcgaactcctgaccttatgcaatccacttgcc

SEQ ID NO: 3914 - DNA, 60 bp, Homo sapiens; identical to SEQ ID NO: 3883

SEQ ID NO: 3915 - DNA, 60 bp, Homo sapiens
atacaaaccatgaaatggtcttaacatatcgaactcctgacctcaaatattccacctgcc

SEQ ID NO: 3916 - DNA, 60 bp, Homo sapiens
gtgacatttgggaaaagcatgccactcttcgaactcctgacctcaaataatctacctgcc

SEQ ID NO: 3917 - DNA, 60 bp, Homo sapiens
aattaaaatatacaaaactgaaaactgttcgatctcctgactttgtgatccttctgcctc

SEQ ID NO: 3918 - DNA, 60 bp, Homo sapiens
aacaacaaaaagctggacaaactaaaaatcgaactcctgacctcaagtaatatccccgcc

SEQ ID NO: 3919 - DNA, 60 bp, Homo sapiens
tgcttcatcaattactgagacagggatgtcgaactcctgacctcaggtaatatgatgtcc

SEQ ID NO: 3920 - DNA, 60 bp, Homo sapiens
cattataaaagactccatcttagcagattcgaactcctgacctcaggtcttctgccagtc

SEQ ID NO: 3921 - DNA, 60 bp, Homo sapiens
aatattaaccatcacagttattgacatatcgatctcctgacctcaagatctgtctgcctc

SEQ ID NO: 3922 - DNA, 60 bp, Homo sapiens
gaatatctagaagaaatgggtaaattcctcgagtccagcctggccaatatagtgagaccc

SEQ ID NO: 3923 - DNA, 60 bp, Homo sapiens
tttgtttctgtttattaaatacactgaatcgaactcctgacctcagatgaactccacctg

SEQ ID NO: 3924 - DNA, 60 bp, Homo sapiens
agcttattgtttatttgtatggcaaaattcgatctcctgactttgtgatccttctgcctc

SEQ ID NO: 3925 - DNA, 60 bp, Homo sapiens
ctttaatatatatttactaaaagagacttcgaactcctgacctcaggatttgccagcctc

SEQ ID NO: 3926 - DNA, 60 bp, Homo sapiens
tgtgtatgtttgtatgatattggataaatcgaactcctgacctcaggtcttctgccagtc

SEQ ID NO: 3927 - DNA, 60 bp, Homo sapiens
cctgttcttgaactttaagtgaatggaatcgatctcctgacctcaagtgatacacttggc

SEQ ID NO: 3928 - DNA, 60 bp, Homo sapiens
tgaggactgcatggttctggcttgatgatcgatctcctgacctcgtttaggtttgtaaac

SEQ ID NO: 3929 - DNA, 60 bp, Homo sapiens
aaagtgcccaattctgtatatttatgagtcgatctcttgacctcatgatcacccctgcct

SEQ ID NO: 3930 - DNA, 60 bp, Homo sapiens
gatcatggggataaagagagccaaactttcgatctcctgaccttgcgatgcctttttagt

SEQ ID NO: 3931 - DNA, 60 bp, Homo sapiens
gttattgtccactggtaattctttctgctcgaactcctgaccacagattatctgcccacc

SEQ ID NO: 3932 - DNA, 60 bp, Homo sapiens
tattactgctatctagtacatctgtaattcgatctcctgacctagggatcgcccacctcg

SEQ ID NO: 3933 - DNA, 60 bp, Homo sapiens; identical to SEQ ID NO: 3881

SEQ ID NO: 3934 - DNA, 60 bp, Homo sapiens
tcaaaactcacaaactgaaagaaatgtgtcgaactcctgacctcctgattcatccacctc

SEQ ID NO: 3935 - DNA, 60 bp, Homo sapiens
gtgctaatacacttaattcttacaacaatcgaactcctgacctctagtaatccacccacc

SEQ ID NO: 3936 - DNA, 60 bp, Homo sapiens
cctttgactaaccattctgtatttgccttcgatctcctgacctcgtgttctacctgcctt

SEQ ID NO: 3937 - DNA, 60 bp, Homo sapiens
ctcatgagaagcatgcaacttggtttcctcgagaccagcctgcaatatggtgaaatgctg

SEQ ID NO: 3938 - DNA, 60 bp, Homo sapiens
gaaaatctagaagaaatggataaattcttcgagaccagcttggctgacgtggtgaaaccc

SEQ ID NO: 3939 - DNA, 60 bp, Homo sapiens
ttggtgagaagtcatacctcaatgtacatcgatctcctgacatgtgatccaccctcctca

SEQ ID NO: 3940 - DNA, 60 bp, Homo sapiens
aagtctacttcctcccagaggtaagctgtcgatctcctgacctcgtaatctacctgcctc

SEQ ID NO: 3941 - DNA, 60 bp, Homo sapiens; identical to SEQ ID NO: 3901

SEQ ID NO: 3942 - DNA, 60 bp, Homo sapiens
ctgagactaaaaaacacttgctgaactgtcgatctcctgacctcgtgatatacccacctc

SEQ ID NO: 3943 - DNA, 60 bp, Homo sapiens
ggtctttggttaatctcactttaataagtcgaactcctgacctcctgattcatccacctc

SEQ ID NO: 3944 - DNA, 60 bp, Homo sapiens
ttactcttcactaattccatggaaaacttcgaactcctgacctcattgattcacccacct

SEQ ID NO: 3945 - DNA, 60 bp, Homo sapiens
atatgaggaactttttccctcttcctattcgaactcctgacctcagatgaactccacctg

SEQ ID NO: 3946 - DNA, 60 bp, Homo sapiens
tctttatagacacatgaaagcaaatgagtcgaactcctgacctgaggcaatctgctggcc

SEQ ID NO: 3947 - DNA, 60 bp, Homo sapiens; identical to SEQ ID NO: 3884

SEQ ID NO: 3948 - DNA, 24 bp, Homo sapiens
gaaatcaatgttcataagtcattt

SEQ ID NO: 3949 - DNA, 24 bp, Homo sapiens
aaggctgaatacattggcattgtt

SEQ ID NO: 3950 - DNA, 21 bp, Homo sapiens
actacaggcgcacgccaccat

SEQ ID NO: 3951 - DNA, 21 bp, Homo sapiens
atttagatttacacaaaggaa

SEQ ID NO: 3952 - DNA, 23 bp, Homo sapiens
ctttttaatttcctttaatctga

SEQ ID NO: 3953 - DNA, 23 bp, Homo sapiens
taaaaattgttgtgtgtttaaaa

SEQ ID NO: 3954 - DNA, 24 bp, Homo sapiens
ggcaacaggcaagaccctgtttca

SEQ ID NO: 3955 - DNA, 24 bp, Homo sapiens
ttgtacctctggtagaattcggct

SEQ ID NO: 3956 - DNA, 23 bp, Homo sapiens
accatatctcaagtcaaactagt

SEQ ID NO: 3957 - DNA, 23 bp, Homo sapiens
aggaattatgggaggacaaacaa

SEQ ID NO: 3958 - DNA, 21 bp, Homo sapiens
tcctgagtgtgcaagagactg

SEQ ID NO: 3959 - DNA, 21 bp, Homo sapiens
tctatatgctttctacctttg

SEQ ID NO: 3960 - DNA, 21 bp, Homo sapiens
aactaagtctggcctattaac

SEQ ID NO: 3961 - DNA, 21 bp, Homo sapiens
taagaagtcagcttgggcctg

SEQ ID NO: 3962 - DNA, 23 bp, Homo sapiens
ctctgttcaaaaaaggaaggctc

SEQ ID NO: 3963 - DNA, 23 bp, Homo sapiens
ggataaactataggtgaatatta

SEQ ID NO: 3964 - DNA, 26 bp, Homo sapiens
gttcccttctctgactgtcacttccc

SEQ ID NO: 3965 - DNA, 26 bp, Homo sapiens
caggagtttgagaccagcctggccaa

SEQ ID NO: 3966 - DNA, 24 bp, Homo sapiens
ttttaaactttcctcagaagccat

SEQ ID NO: 3967 - DNA, 24 bp, Homo sapiens
aaaagtaattttcatttcaaaatg

SEQ ID NO: 3968 - DNA, 25 bp, Homo sapiens
tttgacaaaaccagaaaaaaaatca

SEQ ID NO: 3969 - DNA, 25 bp, Homo sapiens
tgcacaaggagaaaacaccaaggag

SEQ ID NO: 3970 - DNA, 21 bp, Homo sapiens
gttctatcttcataaatcttc

SEQ ID NO: 3971 - DNA, 21 bp, Homo sapiens
acccctaatccactgcaaatc

SEQ ID NO: 3972 - DNA, 24 bp, Homo sapiens
atgatcctgtggcacacataccca

SEQ ID NO: 3973 - DNA, 24 bp, Homo sapiens
ggtgttgcagtttcagaaagtccg

SEQ ID NO: 3974 - DNA, 26 bp, Homo sapiens
tgcctttcccagtccactgactcaag

SEQ ID NO: 3975 - DNA, 26 bp, Homo sapiens
tttcttcatcatatttaagttctgaa

SEQ ID NO: 3976 - DNA, 25 bp, Homo sapiens
taaaggggattatcaccaccgatct

SEQ ID NO: 3977 - DNA, 25 bp, Homo sapiens
gtcatgacaccagtatatttttaaa

SEQ ID NO: 3978 - DNA, 25 bp, Homo sapiens
tagggaataaagattgtcaggttaa

SEQ ID NO: 3979 - DNA, 25 bp, Homo sapiens
ataaagaataaataaattgaaagta

SEQ ID NO: 3980 - DNA, 22 bp, Homo sapiens
gctcctgaacgcccccgcgact

SEQ ID NO: 3981 - DNA, 22 bp, Homo sapiens
tcaaaatgtccaagataggagg

SEQ ID NO: 3982 - DNA, 21 bp, Homo sapiens
aaccgcatcaacacagtgtta

SEQ ID NO: 3983 - DNA, 21 bp, Homo sapiens
agcaggcattgtgttagaccc

SEQ ID NO: 3984 - DNA, 21 bp, Homo sapiens
acctagagaaacagattaagt

SEQ ID NO: 3985 - DNA, 21 bp, Homo sapiens
gtggggcattcagcaaagggc

SEQ ID NO: 3986 - DNA, 21 bp, Homo sapiens
gtagtctgacgaattgttaca

SEQ ID NO: 3987 - DNA, 21 bp, Homo sapiens
aacctataacatcatactcag

SEQ ID NO: 3988 - DNA, 22 bp, Homo sapiens
ctgagcagcaatgctgttttat

SEQ ID NO: 3989 - DNA, 22 bp, Homo sapiens
ctgggggcatggtttgcaaggg

SEQ ID NO: 3990 - DNA, 22 bp, Homo sapiens
aataatttgcaatattttataa

SEQ ID NO: 3991 - DNA, 22 bp, Homo sapiens
atttccttatttgatactagca

SEQ ID NO: 3992 - DNA, 25 bp, Homo sapiens
aggacagatgtggaaaataagccca

SEQ ID NO: 3993 - DNA, 25 bp, Homo sapiens
tttaaatccaacaatgtataaaagg

SEQ ID NO: 3994 - DNA, 24 bp, Homo sapiens
tgaccattattttttcaaatattt

SEQ ID NO: 3995 - DNA, 24 bp, Homo sapiens
ctccaacccttagacggaaaccat

SEQ ID NO: 3996 - DNA, 25 bp, Homo sapiens
gattggttaactttattaggactta

SEQ ID NO: 3997 - DNA, 25 bp, Homo sapiens
aaaagtaggacagttgaaataaaaa

SEQ ID NO: 3998 - DNA, 23 bp, Homo sapiens
ttacctcttgaggaatgccaaac

SEQ ID NO: 3999 - DNA, 23 bp, Homo sapiens
aaattcctgtgattaagtgtttg

SEQ ID NO: 4000 - DNA, 24 bp, Homo sapiens
attgctctgaggtcaagaaccttg

SEQ ID NO: 4001 - DNA, 24 bp, Homo sapiens
aattttaactcatatatgggcata

SEQ ID NO: 4002 - DNA, 25 bp, Homo sapiens
gcaagaaacattagaactggggaaa

SEQ ID NO: 4003 - DNA, 25 bp, Homo sapiens
cttttctctatgtagctattacctt

SEQ ID NO: 4004 - DNA, 25 bp, Homo sapiens
cctttcgtttaaatattcagtaagt

SEQ ID NO: 4005 - DNA, 25 bp, Homo sapiens
gtacgtaatacatagccttgaatca

SEQ ID NO: 4006 - DNA, 23 bp, Homo sapiens
gtagaattagtgggagccctgag

SEQ ID NO: 4007 - DNA, 23 bp, Homo sapiens
ccacctcccaggttcaagcgatt

SEQ ID NO: 4008 - DNA, 21 bp, Homo sapiens
gagaagaatcaaatagatgca

SEQ ID NO: 4009 - DNA, 21 bp, Homo sapiens
gacaagagtctcgctctgtcg

SEQ ID NO: 4010 - DNA, 21 bp, Homo sapiens
tgaatgttttttttgtgggaa

SEQ ID NO: 4011 - DNA, 21 bp, Homo sapiens
aagactgtttggcatatagcg

SEQ ID NO: 4012 - DNA, 25 bp, Homo sapiens
caggtttatagactaagcttgaagg

SEQ ID NO: 4013 - DNA, 25 bp, Homo sapiens
ctgtagtcccagctatttgggaggc

SEQ ID NO: 4014 - DNA, 26 bp, Homo sapiens
ttcctgggctagttgtatgggctggt

SEQ ID NO: 4015 - DNA, 26 bp, Homo sapiens
ttacatttcaaatttatgaactatga

SEQ ID NO: 4016 - DNA, 21 bp, Homo sapiens
taaggagagttttttaaaaaa

SEQ ID NO: 4017 - DNA, 21 bp, Homo sapiens
tttcaaatttatgaactatga

SEQ ID NO: 4018 - DNA, 24 bp, Homo sapiens
gagatgtatccagattgatggaaa

SEQ ID NO: 4019 - DNA, 24 bp, Homo sapiens
atgggcatatgccctccaaattta

SEQ ID NO: 4020 - DNA, 26 bp, Homo sapiens
cactaggttgagcttctcaaaatgca

SEQ ID NO: 4021 - DNA, 26 bp, Homo sapiens
atcacctctggggattttatttatga

SEQ ID NO: 4022 - DNA, 22 bp, Homo sapiens
attttaacctgatagtttaaac

SEQ ID NO: 4023 - DNA, 22 bp, Homo sapiens
aataagaaagttttacctatat

SEQ ID NO: 4024 - DNA, 24 bp, Homo sapiens
ttttctatgcaactgaagtcattt

SEQ ID NO: 4025 - DNA, 24 bp, Homo sapiens
gagattgagaccatcctggccaac

SEQ ID NO: 4026 - DNA, 25 bp, Homo sapiens
tataaacgttgtgaaagaccaagga

SEQ ID NO: 4027 - DNA, 25 bp, Homo sapiens
gaagaaagtacatggcaccttctgc

SEQ ID NO: 4028 - DNA, 40 bp, Homo sapiens
tccttgtgatctacagcttcgaactcctgacctcaacaat

SEQ ID NO: 4029 - DNA, 40 bp, Homo sapiens
atttaatgtcataggaaatcgaactcctgacctcaggtca

SEQ ID NO: 4030 - DNA, 40 bp, Homo sapiens
cactatatgatggtagattcgaactcctgacctcaaccaa

SEQ ID NO: 4031 - DNA, 40 bp, Homo sapiens
tttcttaagctcaggagttcgacacatacactcttccaag

SEQ ID NO: 4032 - DNA, 40 bp, Homo sapiens
caattctaagaacgcaaatcgaactcctgaccccaaatga

SEQ ID NO: 4033 - DNA, 40 bp, Homo sapiens
ttcttttcttttagaacctcgaactcctgaccttatgcaa

SEQ ID NO: 4034 - DNA, 40 bp, Homo sapiens
agttaccacatcttagcttcgatctcctgacctcgtaatc

SEQ ID NO: 4035 - DNA, 40 bp, Homo sapiens
tgaaatggtcttaacatatcgaactcctgacctcaaatat

SEQ ID NO: 4036 - DNA, 40 bp, Homo sapiens
ggaaaagcatgccactcttcgaactcctgacctcaaataa

SEQ ID NO: 4037 - DNA, 40 bp, Homo sapiens
tacaaaactgaaaactgttcgatctcctgactttgtgatc

SEQ ID NO: 4038 - DNA, 40 bp, Homo sapiens
agctggacaaactaaaaatcgaactcctgacctcaagtaa

SEQ ID NO: 4039 - DNA, 40 bp, Homo sapiens
attactgagacagggatgtcgaactcctgacctcaggtaa

SEQ ID NO: 4040 - DNA, 40 bp, Homo sapiens
gactccatcttagcagattcgaactcctgacctcaggtct

SEQ ID NO: 4041 - DNA, 40 bp, Homo sapiens
atcacagttattgacatatcgatctcctgacctcaagatc

SEQ ID NO: 4042 - DNA, 40 bp, Homo sapiens
aagaaatgggtaaattcctcgagtccagcctggccaatat

SEQ ID NO: 4043 - DNA, 40 bp, Homo sapiens
tttattaaatacactgaatcgaactcctgacctcagatga

SEQ ID NO: 4044 - DNA, 40 bp, Homo sapiens
ttatttgtatggcaaaattcgatctcctgactttgtgatc

SEQ ID NO: 4045 - DNA, 40 bp, Homo sapiens
tatttactaaaagagacttcgaactcctgacctcaggatt

SEQ ID NO: 4046 - DNA, 40 bp, Homo sapiens
tgtatgatattggataaatcgaactcctgacctcaggtct

SEQ ID NO: 4047 - DNA, 40 bp, Homo sapiens
aactttaagtgaatggaatcgatctcctgacctcaagtga

SEQ ID NO: 4048 - DNA, 40 bp, Homo sapiens
atggttctggcttgatgatcgatctcctgacctcgtttag

SEQ ID NO: 4049 - DNA, 40 bp, Homo sapiens
attctgtatatttatgagtcgatctcttgacctcatgatc

SEQ ID NO: 4050 - DNA, 40 bp, Homo sapiens
ataaagagagccaaactttcgatctcctgaccttgcgatg

SEQ ID NO: 4051 - DNA, 40 bp, Homo sapiens
actggtaattctttctgctcgaactcctgaccacagatta

SEQ ID NO: 4052 - DNA, 40 bp, Homo sapiens
atctagtacatctgtaattcgatctcctgacctagggatc

SEQ ID NO: 4053 - DNA, 40 bp, Homo sapiens
ttccctgatggctaattgtcgatctcttgaccttatgatc

SEQ ID NO: 4054 - DNA, 40 bp, Homo sapiens
caaactgaaagaaatgtgtcgaactcctgacctcctgatt

SEQ ID NO: 4055 - DNA, 40 bp, Homo sapiens
acttaattcttacaacaatcgaactcctgacctctagtaa

SEQ ID NO: 4056 - DNA, 40 bp, Homo sapiens
accattctgtatttgccttcgatctcctgacctcgtgttc

SEQ ID NO: 4057 - DNA, 40 bp, Homo sapiens
gcatgcaacttggtttcctcgagaccagcctgcaatatgg

SEQ ID NO: 4058 - DNA, 40 bp, Homo sapiens
aagaaatggataaattcttcgagaccagcttggctgacgt

SEQ ID NO: 4059 - DNA, 40 bp, Homo sapiens
gtcatacctcaatgtacatcgatctcctgacatgtgatcc

SEQ ID NO: 4060 - DNA, 40 bp, Homo sapiens
cctcccagaggtaagctgtcgatctcctgacctcgtaatc

SEQ ID NO: 4061 - DNA, 40 bp, Homo sapiens
acatatcctgtgtgaagttcgatctcctgacctcgtgata

SEQ ID NO: 4062 - DNA, 40 bp, Homo sapiens
aaaacacttgctgaactgtcgatctcctgacctcgtgata

SEQ ID NO: 4063 - DNA, 40 bp, Homo sapiens
taatctcactttaataagtcgaactcctgacctcctgatt

SEQ ID NO: 4064 - DNA, 40 bp, Homo sapiens
ctaattccatggaaaacttcgaactcctgacctcattgat

SEQ ID NO: 4065 - DNA, 40 bp, Homo sapiens
ctttttccctcttcctattcgaactcctgacctcagatga

SEQ ID NO: 4066 - DNA, 40 bp, Homo sapiens
cacatgaaagcaaatgagtcgaactcctgacctgaggcaa

SEQ ID NO: 4067 - DNA, 40 bp, Homo sapiens
ttgtttaatgcttaaacatcgatctcctgaccttgtgaac

SEQ ID NO: 4068 - DNA, 40 bp, Homo sapiens
attgttgaggtcaggagttcgaagctgtagatcacaagga

SEQ ID NO: 4069 - DNA, 40 bp, Homo sapiens
tgacctgaggtcaggagttcgatttcctatgacattaaat

SEQ ID NO: 4070 - DNA, 40 bp, Homo sapiens
ttggttgaggtcaggagttcgaatctaccatcatatagtg

SEQ ID NO: 4071 - DNA, 40 bp, Homo sapiens
cttggaagagtgtatgtgtcgaactcctgagcttaagaaa

SEQ ID NO: 4072 - DNA, 40 bp, Homo sapiens
tcatttggggtcaggagttcgatttgcgttcttagaattg

SEQ ID NO: 4073 - DNA, 40 bp, Homo sapiens
ttgcataaggtcaggagttcgaggttctaaaagaaaagaa

SEQ ID NO: 4074 - DNA, 40 bp, Homo sapiens
gattacgaggtcaggagatcgaagctaagatgtggtaact

SEQ ID NO: 4075 - DNA, 40 bp, Homo sapiens
atatttgaggtcaggagttcgatatgttaagaccatttca

SEQ ID NO: 4076 - DNA, 40 bp, Homo sapiens
ttatttgaggtcaggagttcgaagagtggcatgcttttcc

SEQ ID NO: 4077 - DNA, 40 bp, Homo sapiens
gatcacaaagtcaggagatcgaacagttttcagttttgta

SEQ ID NO: 4078 - DNA, 40 bp, Homo sapiens
ttacttgaggtcaggagttcgatttttagtttgtccagct

SEQ ID NO: 4079 - DNA, 40 bp, Homo sapiens
ttacctgaggtcaggagttcgacatccctgtctcagtaat

SEQ ID NO: 4080 - DNA, 40 bp, Homo sapiens
agacctgaggtcaggagttcgaatctgctaagatggagtc

SEQ ID NO: 4081 - DNA, 40 bp, Homo sapiens
gatcttgaggtcaggagatcgatatgtcaataactgtgat

SEQ ID NO: 4082 - DNA, 40 bp, Homo sapiens
atattggccaggctggactcgaggaatttacccatttctt

SEQ ID NO: 4083 - DNA, 40 bp, Homo sapiens
tcatctgaggtcaggagttcgattcagtgtatttaataaa

SEQ ID NO: 4084 - DNA, 40 bp, Homo sapiens
gatcacaaagtcaggagatcgaattttgccatacaaataa

SEQ ID NO: 4085 - DNA, 40 bp, Homo sapiens
aatcctgaggtcaggagttcgaagtctcttttagtaaata

SEQ ID NO: 4086 - DNA, 40 bp, Homo sapiens
agacctgaggtcaggagttcgatttatccaatatcataca

SEQ ID NO: 4087 - DNA, 40 bp, Homo sapiens
tcacttgaggtcaggagatcgattccattcacttaaagtt

SEQ ID NO: 4088 - DNA, 40 bp, Homo sapiens
ctaaacgaggtcaggagatcgatcatcaagccagaaccat

SEQ ID NO: 4089 - DNA, 40 bp, Homo sapiens
gatcatgaggtcaagagatcgactcataaatatacagaat

SEQ ID NO: 4090 - DNA, 40 bp, Homo sapiens
catcgcaaggtcaggagatcgaaagtttggctctctttat

SEQ ID NO: 4091 - DNA, 40 bp, Homo sapiens
taatctgtggtcaggagttcgagcagaaagaattaccagt

SEQ ID NO: 4092 - DNA, 40 bp, Homo sapiens
gatccctaggtcaggagatcgaattacagatgtactagat

SEQ ID NO: 4093 - DNA, 40 bp, Homo sapiens
gatcataaggtcaagagatcgacaattagccatcagggaa

SEQ ID NO: 4094 - DNA, 40 bp, Homo sapiens
aatcaggaggtcaggagttcgacacatttctttcagtttg

SEQ ID NO: 4095 - DNA, 40 bp, Homo sapiens
ttactagaggtcaggagttcgattgttgtaagaattaagt

SEQ ID NO: 4096 - DNA, 40 bp, Homo sapiens
gaacacgaggtcaggagatcgaaggcaaatacagaatggt

SEQ ID NO: 4097 - DNA, 40 bp, Homo sapiens
ccatattgcaggctggtctcgaggaaaccaagttgcatgc

SEQ ID NO: 4098 - DNA, 40 bp, Homo sapiens
acgtcagccaagctggtctcgaagaatttatccatttctt

SEQ ID NO: 4099 - DNA, 40 bp, Homo sapiens
ggatcacatgtcaggagatcgatgtacattgaggtatgac

SEQ ID NO: 4100 - DNA, 40 bp, Homo sapiens
gattacgaggtcaggagatcgacagcttacctctgggagg

SEQ ID NO: 4101 - DNA, 40 bp, Homo sapiens
tatcacgaggtcaggagatcgaacttcacacaggatatgt

SEQ ID NO: 4102 - DNA, 40 bp, Homo sapiens
tatcacgaggtcaggagatcgacagttcagcaagtgtttt

SEQ ID NO: 4103 - DNA, 40 bp, Homo sapiens
aatcaggaggtcaggagttcgacttattaaagtgagatta

SEQ ID NO: 4104 - DNA, 40 bp, Homo sapiens
atcaatgaggtcaggagttcgaagttttccatggaattag

SEQ ID NO: 4105 - DNA, 40 bp, Homo sapiens
tcatctgaggtcaggagttcgaataggaagagggaaaaag

SEQ ID NO: 4106 - DNA, 40 bp, Homo sapiens
ttgcctcaggtcaggagttcgactcatttgctttcatgtg

SEQ ID NO: 4107 - DNA, 40 bp, Homo sapiens
gttcacaaggtcaggagatcgatgtttaagcattaaacaa

SEQ ID NO: 4108 - DNA, 60 bp, Homo sapiens; identical to SEQ ID NO: 3902

SEQ ID NO: 4109 - DNA, 60 bp, Homo sapiens
gtggacctcatccagaagcacaagagcatcgaactcctgaccttaagcaacctacctgcc

SEQ ID NO: 4110 - DNA, 60 bp, Homo sapiens
ctgaatctggaccttgtcaaggaagcaatcgaactcctgacatcaggtgctccacctgcc

SEQ ID NO: 4111 - DNA, 60 bp, Homo sapiens
ttccccaagcttgaaattatctccagcttcgaactcctgaccttatgatgcacctgcctt

SEQ ID NO: 4112 - DNA, 60 bp, Homo sapiens
aaacttcagacaatattcctgatgaacatcgaactcctgggctcttgatccttccgactc

SEQ ID NO: 4113 - DNA, 60 bp, Homo sapiens; identical to SEQ ID NO: 3890

SEQ ID NO: 4114 - DNA, 60 bp, Homo sapiens
gatgtaactatgttaaggatgttgagattcgaactcctgacctcgtgaagcacccctctc

SEQ ID NO: 4115 - DNA, 60 bp, Homo sapiens
atttagtcctgcatttgggcattcaaagtcgaactcctgacctcaggtcttctgccagtc

SEQ ID NO: 4116 - DNA, 60 bp, Homo sapiens; identical to SEQ ID NO: 3905

SEQ ID NO: 4117 - DNA, 60 bp, Homo sapiens; identical to SEQ ID NO: 3903

SEQ ID NO: 4118 - DNA, 60 bp, Homo sapiens; identical to SEQ ID NO: 3877

SEQ ID NO: 4119 - DNA, 60 bp, Homo sapiens; identical to SEQ ID NO: 3882

SEQ ID NO: 4120 - DNA, 60 bp, Homo sapiens; identical to SEQ ID NO: 3907

SEQ ID NO: 4121 - DNA, 60 bp, Homo sapiens
ttttctggatgaactttattatcagtgatcgaactcctgacctctagtaatccacccacc

SEQ ID NO: 4122 - DNA, 60 bp, Homo sapiens
gattctgggtaaagggtatcattgtaagtcgaactcctgacctcaagtaatatccccgcc

SEQ ID NO: 4123 - DNA, 60 bp, Homo sapiens; identical to SEQ ID NO: 3889

SEQ ID NO: 4124 - DNA, 60 bp, Homo sapiens; identical to SEQ ID NO: 3888

SEQ ID NO: 4125 - DNA, 60 bp, Homo sapiens
gctgcccgctactcagcaggaggggaagtcgaactcctgacctcaagtatttgcctgcct

SEQ ID NO: 4126 - DNA, 60 bp, Homo sapiens; identical to SEQ ID NO: 3893

SEQ ID NO: 4127 - DNA, 60 bp, Homo sapiens
ggttgtttcatatttatggagtataccctcgagaccagcctgatgggtgaaaccccatct

SEQ ID NO: 4128 - DNA, 60 bp, Homo sapiens
ctctcaactttggatgtaagaatcatcttcgatctcctgacctcatcatcctcctgcctc

SEQ ID NO: 4129 - DNA, 60 bp, Homo sapiens
taaaagtgaacaaggaaaataccacaagtcgatctcctgacctcatgattctcctgcctc

SEQ ID NO: 4130 - DNA, 60 bp, Homo sapiens; identical to SEQ ID NO: 3898

SEQ ID NO: 4131 - DNA, 60 bp, Homo sapiens
cttcacttcctgaagcttcaacttcatgtcgatctcctgacctcgtgatatacccacctc

SEQ ID NO: 4132 - DNA, 60 bp, Homo sapiens
ctgttcccatataagatggtaaacttcatcgaacgcctgacctcagttgatctacccacc

SEQ ID NO: 4133 - DNA, 60 bp, Homo sapiens
cttgcgctccatctcttcagatacatgttcgatctcctgacctcgtgatatacccacctc

SEQ ID NO: 4134 - DNA, 60 bp, Homo sapiens
aattgcttccatatatacaatgatctggtcgatctcctgactttgtgatccttctgcctc

SEQ ID NO: 4135 - DNA, 60 bp, Homo sapiens
gcagtgaaatgtttgattggcccacacttcgaactcctgacctcagatgattcatctgcc

SEQ ID NO: 4136 - DNA, 60 bp, Homo sapiens
gattccgacatataataatcaactaaagtcgaactcctgaccttggcatctgcccacctt

SEQ ID NO: 4137 - DNA, 60 bp, Homo sapiens
ctccctgaaaggatcagtaacttcaacatcgatctcctgatctcatgatccacttgcctt

SEQ ID NO: 4138 - DNA, 60 bp, Homo sapiens; identical to SEQ ID NO: 3887

SEQ ID NO: 4139 - DNA, 60 bp, Homo sapiens
ggagtttttaaatgaaaggaaacaggaatcgaactcctgacctcaggtggtcatatcatc

SEQ ID NO: 4140 - DNA, 60 bp, Homo sapiens
ggtgggaggacttcttgagtgtaggagttcgacacatacactctcacaagactaaaccag

SEQ ID NO: 4141 - DNA, 60 bp, Homo sapiens
gagcaccacacaggataataccaaaaaatcgatctcctgaccttgtgatctcaccttggc

SEQ ID NO: 4142 - DNA, 60 bp, Homo sapiens; identical to SEQ ID NO: 3906

SEQ ID NO: 4143 - DNA, 60 bp, Homo sapiens
ttttcataacctaatatcaaaagtgacatcgaactcttgacatcatgatctgcctgcctc

SEQ ID NO: 4144 - DNA, 60 bp, Homo sapiens
gagacgggtggatcatgactccaggagatcgaactcctgaccgcaggttacctgcccgag

SEQ ID NO: 4145 - DNA, 60 bp, Homo sapiens
aaggtgacttattagaaaactaaaaacctcgagaccatcctgaccaacatgttgaaaccc

SEQ ID NO: 4146 - DNA, 60 bp, Homo sapiens
tgctaaggccatgaccacaggaggaaggtcgatctcctgaccttgcgatgcctttttagt

SEQ ID NO: 4147 - DNA, 21 bp, Homo sapiens
aaccaaagaaatcatgaagaa

SEQ ID NO: 4148 - DNA, 21 bp, Homo sapiens
tcaccgaattaggaggtttag

SEQ ID NO: 4149 - DNA, 24 bp, Homo sapiens
gaacagtttgtggatctgtgcatc

SEQ ID NO: 4150 - DNA, 24 bp, Homo sapiens
ttggcaagtcctggatggggcagg

SEQ ID NO: 4151 - DNA, 22 bp, Homo sapiens
aggaaggtgtgtgaggtgggcc

SEQ ID NO: 4152 - DNA, 22 bp, Homo sapiens
aaaacaacaacgacaaccaaaa

SEQ ID NO: 4153 - DNA, 21 bp, Homo sapiens
gacaccaccaccaacatcctg

SEQ ID NO: 4154 - DNA, 21 bp, Homo sapiens
atgcaaagaaactctgttgga

SEQ ID NO: 4155 - DNA, 23 bp, Homo sapiens
actgaaattattccaaaaaattg

SEQ ID NO: 4156 - DNA, 23 bp, Homo sapiens
taatgcccttgtctttgaaaagt

SEQ ID NO: 4157 - DNA, 25 bp, Homo sapiens
ctccctaactcattttatgaggcca

SEQ ID NO: 4158 - DNA, 25 bp, Homo sapiens
aataaggctttaaatctctccaatt

SEQ ID NO: 4159 - DNA, 25 bp, Homo sapiens
tcattcctcatgtatcaaaatatca

SEQ ID NO: 4160 - DNA, 25 bp, Homo sapiens
ggagtttacaatgcgtctctccttg

SEQ ID NO: 4161 - DNA, 21 bp, Homo sapiens
gatgactgtcttattccatca

SEQ ID NO: 4162 - DNA, 21 bp, Homo sapiens
agcctcacggtggggcattca

SEQ ID NO: 4163 - DNA, 24 bp, Homo sapiens
ggtccatcaacagatgtatggata

SEQ ID NO: 4164 - DNA, 24 bp, Homo sapiens
ctggagcacagtgcctgatcagtc

SEQ ID NO: 4165 - DNA, 25 bp, Homo sapiens
gatataatcttatattaaaatctaa

SEQ ID NO: 4166 - DNA, 25 bp, Homo sapiens
gcagcctccacttactgggttaagc

SEQ ID NO: 4167 - DNA, 26 bp, Homo sapiens
catatgaatgttcactgcagcactat

SEQ ID NO: 4168 - DNA, 26 bp, Homo sapiens
cccagcagtgcccttgagtggttggg

SEQ ID NO: 4169 - DNA, 21 bp, Homo sapiens
gtataaaaatgaacaagatgc

SEQ ID NO: 4170 - DNA, 21 bp, Homo sapiens
agatggtgccactgcactcca

SEQ ID NO: 4171 - DNA, 26 bp, Homo sapiens
tgctcctgaatgactactgggtacat

SEQ ID NO: 4172 - DNA, 26 bp, Homo sapiens
aaattgaggtctattttcaaaatatc

SEQ ID NO: 4173 - DNA, 24 bp, Homo sapiens
tttgcctattcctgtaacaatacc

SEQ ID NO: 4174 - DNA, 24 bp, Homo sapiens
aatatttgtattttatactgtata

SEQ ID NO: 4175 - DNA, 26 bp, Homo sapiens
gagagctaaatagttttattgctctg

SEQ ID NO: 4176 - DNA, 26 bp, Homo sapiens
atgaatgtatgcacaaggagaaaaca

SEQ ID NO: 4177 - DNA, 26 bp, Homo sapiens
acattggataaagggtcatcatctct

SEQ ID NO: 4178 - DNA, 26 bp, Homo sapiens
tcaaggtgcataattaagctctgcaa

SEQ ID NO: 4179 - DNA, 26 bp, Homo sapiens
cagaaagtgttaaaagaaaaacttca

SEQ ID NO: 4180 - DNA, 26 bp, Homo sapiens
tcatcagataaacaatatttgtattt

SEQ ID NO: 4181 - DNA, 21 bp, Homo sapiens
attcgtggagaagagacgaca

SEQ ID NO: 4182 - DNA, 21 bp, Homo sapiens
gtggatacatgacgtgcatgc

SEQ ID NO: 4183 - DNA, 26 bp, Homo sapiens
aaaagaaaggggtaggtgagagaggc

SEQ ID NO: 4184 - DNA, 26 bp, Homo sapiens
ctggtgtgcacaggtccctggagatt

SEQ ID NO: 4185 - DNA, 24 bp, Homo sapiens
tttaggtggaagtaccagttaatt

SEQ ID NO: 4186 - DNA, 24 bp, Homo sapiens
tgcccaggccggagtgcaatggca

SEQ ID NO: 4187 - DNA, 22 bp, Homo sapiens
ttttagcatctcctcaggaagc

SEQ ID NO: 4188 - DNA, 22 bp, Homo sapiens
tttccgagttatgacccctggt

SEQ ID NO: 4189 - DNA, 24 bp, Homo sapiens
acggagaaaaaaaaaggtctcccc

SEQ ID NO: 4190 - DNA, 24 bp, Homo sapiens
aaagtgctgggattacaggcgtaa

SEQ ID NO: 4191 - DNA, 24 bp, Homo sapiens
ccgaaaagtggattctccagtggt

SEQ ID NO: 4192 - DNA, 24 bp, Homo sapiens
cataagccactgcacccagccttc

SEQ ID NO: 4193 - DNA, 23 bp, Homo sapiens
tgttgtcccaaggcatacaaagg

SEQ ID NO: 4194 - DNA, 23 bp, Homo sapiens
tgaaaaatattattttattgtct

SEQ ID NO: 4195 - DNA, 25 bp, Homo sapiens
caaacttttttgttattatatctgt

SEQ ID NO: 4196 - DNA, 25 bp, Homo sapiens
aggattcatgcagttgctatgatta

SEQ ID NO: 4197 - DNA, 26 bp, Homo sapiens
ccatccaatgaagcctcaccaaatct

SEQ ID NO: 4198 - DNA, 26 bp, Homo sapiens
aattgatgtgtccaagtttcaaaact

SEQ ID NO: 4199 - DNA, 26 bp, Homo sapiens
aaagttaaaaaaaaggaaaggcaaat

SEQ ID NO: 4200 - DNA, 26 bp, Homo sapiens
atgcaaaacttaccaaagagtcagtg

SEQ ID NO: 4201 - DNA, 25 bp, Homo sapiens
attatgactttttcttttcctgtgc

SEQ ID NO: 4202 - DNA, 25 bp, Homo sapiens
tgattcttaattttctgaaactaat

SEQ ID NO: 4203 - DNA, 22 bp, Homo sapiens
gattctcaaaccttgcaatatt

SEQ ID NO: 4204 - DNA, 22 bp, Homo sapiens
gtgctttcagatttatgctctt

SEQ ID NO: 4205 - DNA, 24 bp, Homo sapiens
ccatcctcttgtagaaagcagtct

SEQ ID NO: 4206 - DNA, 24 bp, Homo sapiens
aatggcaggtgagtttaatatttg

SEQ ID NO: 4207 - DNA, 23 bp, Homo sapiens
cgtgacatacacaaaaacttaaa

SEQ ID NO: 4208 - DNA, 23 bp, Homo sapiens
tgttgtggagactctgcactgtg

SEQ ID NO: 4209 - DNA, 24 bp, Homo sapiens
aaaaatgacaactgaaaaccatta

SEQ ID NO: 4210 - DNA, 24 bp, Homo sapiens
gaaggatattaaggaaaaacagag

SEQ ID NO: 4211 - DNA, 21 bp, Homo sapiens
ctttggacataagaagagagt

SEQ ID NO: 4212 - DNA, 21 bp, Homo sapiens
atccatctggtcctggactct

SEQ ID NO: 4213 - DNA, 24 bp, Homo sapiens
tatcaaaggtgtaacacatgcata

SEQ ID NO: 4214 - DNA, 24 bp, Homo sapiens
accagcctaggcaacatagggaga

SEQ ID NO: 4215 - DNA, 22 bp, Homo sapiens
agctcttccctgctcgcttttg

SEQ ID NO: 4216 - DNA, 22 bp, Homo sapiens
aggcccagggcaccctggccat

SEQ ID NO: 4217 - DNA, 26 bp, Homo sapiens
tagatctctccattgggtagatcaca

SEQ ID NO: 4218 - DNA, 26 bp, Homo sapiens
atgttgaaacctaatcggtaatgtaa

SEQ ID NO: 4219 - DNA, 21 bp, Homo sapiens
gagccactgtgcctggccaag

SEQ ID NO: 4220 - DNA, 21 bp, Homo sapiens
gcaggattgcaggcgtgagcc

SEQ ID NO: 4221 - DNA, 22 bp, Homo sapiens
gtaagaaaattatgaagtaagt

SEQ ID NO: 4222 - DNA, 22 bp, Homo sapiens
ctgtcgccaggctggagtgcag

SEQ ID NO: 4223 - DNA, 22 bp, Homo sapiens
gatatggaaagaaagccatata

SEQ ID NO: 4224 - DNA, 22 bp, Homo sapiens
aaacccaagaagacatcacaag

SEQ ID NO: 4225 - DNA, 40 bp, Homo sapiens
ctgagtcactaaggctagtcgaactcctgacctcaagtaa

SEQ ID NO: 4226 - DNA, 40 bp, Homo sapiens
tccagaagcacaagagcatcgaactcctgaccttaagcaa

SEQ ID NO: 4227 - DNA, 40 bp, Homo sapiens
accttgtcaaggaagcaatcgaactcctgacatcaggtgc

SEQ ID NO: 4228 - DNA, 40 bp, Homo sapiens
ttgaaattatctccagcttcgaactcctgaccttatgatg

SEQ ID NO: 4229 - DNA, 40 bp, Homo sapiens
caatattcctgatgaacatcgaactcctgggctcttgatc

SEQ ID NO: 4230 - DNA, 40 bp, Homo sapiens
caatatccctgatgaacatcgaactcctgacctcaagtga

SEQ ID NO: 4231 - DNA, 40 bp, Homo sapiens
tgttaaggatgttgagattcgaactcctgacctcgtgaag

SEQ ID NO: 4232 - DNA, 40 bp, Homo sapiens
gcatttgggcattcaaagtcgaactcctgacctcaggtct

SEQ ID NO: 4233 - DNA, 40 bp, Homo sapiens
ttacaacatgaatgaacctcgagactagcctgaccaacgt

SEQ ID NO: 4234 - DNA, 40 bp, Homo sapiens
aattacataggaatcaactcgagaccagcctccaacatgg

SEQ ID NO: 4235 - DNA, 40 bp, Homo sapiens
atgtattttgtgggaacatcgaactcctgaccctcatgtg

SEQ ID NO: 4236 - DNA, 40 bp, Homo sapiens
taccaaaagaattcaagatcgaactcctgacctccagtaa

SEQ ID NO: 4237 - DNA, 40 bp, Homo sapiens
agcaagaaagatttaaaatcgaactcctgaccgggggtga

SEQ ID NO: 4238 - DNA, 40 bp, Homo sapiens
gaactttattatcagtgatcgaactcctgacctctagtaa

SEQ ID NO: 4239 - DNA, 40 bp, Homo sapiens
aaagggtatcattgtaagtcgaactcctgacctcaagtaa

SEQ ID NO: 4240 - DNA, 40 bp, Homo sapiens
aagatgggggaatgcaaatcgaactcctgaccccatgtga

SEQ ID NO: 4241 - DNA, 40 bp, Homo sapiens
tagagagacatacaggaatcgaactcctgacctctagtaa

SEQ ID NO: 4242 - DNA, 40 bp, Homo sapiens
actcagcaggaggggaagtcgaactcctgacctcaagtat

SEQ ID NO: 4243 - DNA, 40 bp, Homo sapiens
ggtatctacaaagcagtatcgatctcctgacctcatcatc

SEQ ID NO: 4244 - DNA, 40 bp, Homo sapiens
tatttatggagtataccctcgagaccagcctgatgggtga

SEQ ID NO: 4245 - DNA, 40 bp, Homo sapiens
tggatgtaagaatcatcttcgatctcctgacctcatcatc

SEQ ID NO: 4246 - DNA, 40 bp, Homo sapiens
caaggaaaataccacaagtcgatctcctgacctcatgatt

SEQ ID NO: 4247 - DNA, 40 bp, Homo sapiens
tcgctggtaaattggaagtcgaactcctgacctcaggaga

SEQ ID NO: 4248 - DNA, 40 bp, Homo sapiens
tgaagcttcaacttcatgtcgatctcctgacctcgtgata

SEQ ID NO: 4249 - DNA, 40 bp, Homo sapiens
ataagatggtaaacttcatcgaacgcctgacctcagttga

SEQ ID NO: 4250 - DNA, 40 bp, Homo sapiens
atctcttcagatacatgttcgatctcctgacctcgtgata

SEQ ID NO: 4251 - DNA, 40 bp, Homo sapiens
atatatacaatgatctggtcgatctcctgactttgtgatc

SEQ ID NO: 4252 - DNA, 40 bp, Homo sapiens
gtttgattggcccacacttcgaactcctgacctcagatga

SEQ ID NO: 4253 - DNA, 40 bp, Homo sapiens
tataataatcaactaaagtcgaactcctgaccttggcatc

SEQ ID NO: 4254 - DNA, 40 bp, Homo sapiens
ggatcagtaacttcaacatcgatctcctgatctcatgatc

SEQ ID NO: 4255 - DNA, 40 bp, Homo sapiens
catctttttttttttttttcgaactcctgacctaaggtga

SEQ ID NO: 4256 - DNA, 40 bp, Homo sapiens
aatgaaaggaaacaggaatcgaactcctgacctcaggtgg

SEQ ID NO: 4257 - DNA, 40 bp, Homo sapiens
cttcttgagtgtaggagttcgacacatacactctcacaag

SEQ ID NO: 4258 - DNA, 40 bp, Homo sapiens
caggataataccaaaaaatcgatctcctgaccttgtgatc

SEQ ID NO: 4259 - DNA, 40 bp, Homo sapiens
aagagaacaccctaaaaatcgaactcctgacctcaggtgg

SEQ ID NO: 4260 - DNA, 40 bp, Homo sapiens
ctaatatcaaaagtgacatcgaactcttgacatcatgatc

SEQ ID NO: 4261 - DNA, 40 bp, Homo sapiens
gatcatgactccaggagatcgaactcctgaccgcaggtta

SEQ ID NO: 4262 - DNA, 40 bp, Homo sapiens
attagaaaactaaaaacctcgagaccatcctgaccaacat

SEQ ID NO: 4263 - DNA, 40 bp, Homo sapiens
atgaccacaggaggaaggtcgatctcctgaccttgcgatg

SEQ ID NO: 4264 - DNA, 40 bp, Homo sapiens
ttacttgaggtcaggagttcgactagccttagtgactcag

SEQ ID NO: 4265 - DNA, 40 bp, Homo sapiens
ttgcttaaggtcaggagttcgatgctcttgtgcttctgga

SEQ ID NO: 4266 - DNA, 40 bp, Homo sapiens
gcacctgatgtcaggagttcgattgcttccttgacaaggt

SEQ ID NO: 4267 - DNA, 40 bp, Homo sapiens
catcataaggtcaggagttcgaagctggagataatttcaa

SEQ ID NO: 4268 - DNA, 40 bp, Homo sapiens
gatcaagagcccaggagttcgatgttcatcaggaatattg

SEQ ID NO: 4269 - DNA, 40 bp, Homo sapiens
tcacttgaggtcaggagttcgatgttcatcagggatattg

SEQ ID NO: 4270 - DNA, 40 bp, Homo sapiens
cttcacgaggtcaggagttcgaatctcaacatccttaaca

SEQ ID NO: 4271 - DNA, 40 bp, Homo sapiens
agacctgaggtcaggagttcgactttgaatgcccaaatgc

SEQ ID NO: 4272 - DNA, 40 bp, Homo sapiens
acgttggtcaggctagtctcgaggttcattcatgttgtaa

SEQ ID NO: 4273 - DNA, 40 bp, Homo sapiens
ccatgttggaggctggtctcgagttgattcctatgtaatt

SEQ ID NO: 4274 - DNA, 40 bp, Homo sapiens
cacatgagggtcaggagttcgatgttcccacaaaatacat

SEQ ID NO: 4275 - DNA, 40 bp, Homo sapiens
ttactggaggtcaggagttcgatcttgaattcttttggta

SEQ ID NO: 4276 - DNA, 40 bp, Homo sapiens
tcacccccggtcaggagttcgattttaaatctttcttgct

SEQ ID NO: 4277 - DNA, 40 bp, Homo sapiens
ttactagaggtcaggagttcgatcactgataataaagttc

SEQ ID NO: 4278 - DNA, 40 bp, Homo sapiens
ttacttgaggtcaggagttcgacttacaatgatacccttt

SEQ ID NO: 4279 - DNA, 40 bp, Homo sapiens
tcacatggggtcaggagttcgatttgcattcccccatctt

SEQ ID NO: 4280 - DNA, 40 bp, Homo sapiens
ttactagaggtcaggagttcgattcctgtatgtctctcta

SEQ ID NO: 4281 - DNA, 40 bp, Homo sapiens
atacttgaggtcaggagttcgacttcccctcctgctgagt

SEQ ID NO: 4282 - DNA, 40 bp, Homo sapiens
gatgatgaggtcaggagatcgatactgctttgtagatacc

SEQ ID NO: 4283 - DNA, 40 bp, Homo sapiens
tcacccatcaggctggtctcgagggtatactccataaata

SEQ ID NO: 4284 - DNA, 40 bp, Homo sapiens
gatgatgaggtcaggagatcgaagatgattcttacatcca

SEQ ID NO: 4285 - DNA, 40 bp, Homo sapiens
aatcatgaggtcaggagatcgacttgtggtattttccttg

SEQ ID NO: 4286 - DNA, 40 bp, Homo sapiens
tctcctgaggtcaggagttcgacttccaatttaccagcga

SEQ ID NO: 4287 - DNA, 40 bp, Homo sapiens
tatcacgaggtcaggagatcgacatgaagttgaagcttca

SEQ ID NO: 4288 - DNA, 40 bp, Homo sapiens
tcaactgaggtcaggcgttcgatgaagtttaccatcttat

SEQ ID NO: 4289 - DNA, 40 bp, Homo sapiens
tatcacgaggtcaggagatcgaacatgtatctgaagagat

SEQ ID NO: 4290 - DNA, 40 bp, Homo sapiens
gatcacaaagtcaggagatcgaccagatcattgtatatat

SEQ ID NO: 4291 - DNA, 40 bp, Homo sapiens
tcatctgaggtcaggagttcgaagtgtgggccaatcaaac

SEQ ID NO: 4292 - DNA, 40 bp, Homo sapiens
gatgccaaggtcaggagttcgactttagttgattattata

SEQ ID NO: 4293 - DNA, 40 bp, Homo sapiens
gatcatgagatcaggagatcgatgttgaagttactgatcc

SEQ ID NO: 4294 - DNA, 40 bp, Homo sapiens
tcaccttaggtcaggagttcgaaaaaaaaaaaaaaagatg

SEQ ID NO: 4295 - DNA, 40 bp, Homo sapiens
ccacctgaggtcaggagttcgattcctgtttcctttcatt

SEQ ID NO: 4296 - DNA, 40 bp, Homo sapiens
cttgtgagagtgtatgtgtcgaactcctacactcaagaag

SEQ ID NO: 4297 - DNA, 40 bp, Homo sapiens
gatcacaaggtcaggagatcgattttttggtattatcctg

SEQ ID NO: 4298 - DNA, 40 bp, Homo sapiens
ccacctgaggtcaggagttcgatttttagggtgttctctt

SEQ ID NO: 4299 - DNA, 40 bp, Homo sapiens
gatcatgatgtcaagagttcgatgtcacttttgatattag

SEQ ID NO: 4300 - DNA, 40 bp, Homo sapiens
taacctgcggtcaggagttcgatctcctggagtcatgatc

SEQ ID NO: 4301 - DNA, 40 bp, Homo sapiens
atgttggtcaggatggtctcgaggtttttagttttctaat

SEQ ID NO: 4302 - DNA, 40 bp, Homo sapiens
catcgcaaggtcaggagatcgaccttcctcctgtggtcat

SEQ ID NO: 4303 - DNA, 60 bp, Homo sapiens
taaaaaagaatcaacttttattttagaatcgaactcctgacctcacatgtttatctgcct

SEQ ID NO: 4304 - DNA, 60 bp, Homo sapiens
taaacataattgataacattgtttgccttcgaactcctgaccatagctcctgaaatattt

SEQ ID NO: 4305 - DNA, 60 bp, Homo sapiens
attgttaaacgtaaaacaaagaaatcaatcgaactcctgacctttaatgatccacctacc

SEQ ID NO: 4306 - DNA, 60 bp, Homo sapiens
tagatttttgtggatgtacatttttagttcgaactcctgacctcagttaacctacctgcc

SEQ ID NO: 4307 - DNA, 60 bp, Homo sapiens
acttttctaattggaagactcctgacaatcgaactcctgacctaaggtaattcacctgcc

SEQ ID NO: 4308 - DNA, 60 bp, Homo sapiens
taatatcatcactgaagtataatgtgaatcgatctcctgacccagtgatctaaccccctt

SEQ ID NO: 4309 - DNA, 60 bp, Homo sapiens
ttggttcagattattagggaaataaaaatcgaactcctgaccttaagtgattttcccacc

SEQ ID NO: 4310 - DNA, 60 bp, Homo sapiens
aaaacaaattatgttcaaatgtatacattcgatctcctgaccttttgatacacccatctt

SEQ ID NO: 4311 - DNA, 60 bp, Homo sapiens
atacttaggaatatacctaacaaaggagtcgaactcctgacctcagttaacctacctgcc

SEQ ID NO: 4312 - DNA, 60 bp, Homo sapiens
ctgattcttcaagtctctatggatcacttcgatctcctgaccacctgatccattcacctc

SEQ ID NO: 4313 - DNA, 60 bp, Homo sapiens
aaattgaggagttctgtaataaatgtattcgaactcctgacctcaacaattcacccatct

SEQ ID NO: 4314 - DNA, 60 bp, Homo sapiens
cttgtgattatctagagtttgaagagtttcgatctcctgacctctttttccacctgcctt

SEQ ID NO: 4315 - DNA, 60 bp, Homo sapiens
aaatatgtagtcaatgaaagtatcaaaatcgagaccagccgaaattacaagaattagcca

SEQ ID NO: 4316 - DNA, 60 bp, Homo sapiens
gttttaaactttcctcaaggcctagtattcgaactcctgacctttttattcctcactttg

SEQ ID NO: 4317 - DNA, 60 bp, Homo sapiens
cttctaggtggtacatcccaaaggcagatcgaactcctgaccttaagcaacctacctgcc

SEQ ID NO: 4318 - DNA, 60 bp, Homo sapiens
gaaagtcactacctttcttttctattcttcgaactcctgacctcctgattcatccacctc

SEQ ID NO: 4319 - DNA, 60 bp, Homo sapiens
gaagcaacttgtcacatctaagagatcctcgattttagatctttcctgctttctcttatg

SEQ ID NO: 4320 - DNA, 60 bp, Homo sapiens
aatatggaatttcacaaaggactaagaatcgatctcctgaccacctgatccattcacctc

SEQ ID NO: 4321 - DNA, 60 bp, Homo sapiens
tatctgacatatgaaatggctctaaatttcgaactcctgacctcaaattatccatcctcc

SEQ ID NO: 4322 - DNA, 60 bp, Homo sapiens
aaaaaggatttgcttaataatttcagaatcgagaccagccttttgatagagacaagaccc

SEQ ID NO: 4323 - DNA, 60 bp, Homo sapiens
caataaaaagactctaagacataaaaggtcgaactcctgacaccagtgatccagcttcct

SEQ ID NO: 4324 - DNA, 60 bp, Homo sapiens
ttctcattttactatgcagaatcagagttcgaggaatttatccatttcttctagattttc

SEQ ID NO: 4325 - DNA, 60 bp, Homo sapiens
aaataccaaagaatatacgtaaccaaggtcgaactcctgacttcattatctgctcacctc

SEQ ID NO: 4326 - DNA, 60 bp, Homo sapiens
gctttttatatttttattttgcttttcatcgatctcctgaccacctgatccattcacctc

SEQ ID NO: 4327 - DNA, 60 bp, Homo sapiens
tggctaatttttttaatttttagtagagtcgaactcctaacctctagtgatccattcacc

SEQ ID NO: 4328 - DNA, 60 bp, Homo sapiens
ctatagcaagttttaggttgcttggtaatcgaactcctgaccttatgcaatccacttgcc

SEQ ID NO: 4329 - DNA, 60 bp, Homo sapiens
ttttccttttgtaaaataagtttgtctttcgatctcctgactttgtgatccttctgcctc

SEQ ID NO: 4330 - DNA, 60 bp, Homo sapiens
atgagaaagagaaacacttcaatatttttcgaactcctgaccttaggcaattcgtccacc

SEQ ID NO: 4331 - DNA, 60 bp, Homo sapiens
aggtgactgaggccaggagactgagaagtcgaactcctggcctcgggatcctcttccctc

SEQ ID NO: 4332 - DNA, 60 bp, Homo sapiens
aaatatttcaggagctatggtcaggagttcgaattgtaatccctatgtgcaggggacagg

SEQ ID NO: 4333 - DNA, 60 bp, Homo sapiens
atctagtgtaaaaagccttctgggtaagtcgaactcctgactctcagttgatctacccgc

SEQ ID NO: 4334 - DNA, 60 bp, Homo sapiens
tgtttttattttcatgttttaattttgttcgaactcttgacctcaggtaaaccacccacc

SEQ ID NO: 4335 - DNA, 60 bp, Homo sapiens
gtggtatttaaaataatgtgaggaaagttcgaactcctgacttcggtgatctacctgccg

SEQ ID NO: 4336 - DNA, 60 bp, Homo sapiens
aaaatttcagttagacacaggaataagttcgaactcctgacctcctgattcatccacctc

SEQ ID NO: 4337 - DNA, 60 bp, Homo sapiens
ccccactaaagcagctagatacagactgtcgatctccttacctcgtaatctgcctgcata

SEQ ID NO: 4338 - DNA, 60 bp, Homo sapiens
attttttaaaaatattaaacctttgaaatcgaactcctggccttaagtgatttgtctgcc

SEQ ID NO: 4339 - DNA, 60 bp, Homo sapiens
cttcctacaagattatttaacttaagtttcgaactcctgacctaaggtaattcacctgcc

SEQ ID NO: 4340 - DNA, 60 bp, Homo sapiens
attactgggagttctgtctaagacacgatcgaactcctgacccaagtgttctccccacct

SEQ ID NO: 4341 - DNA, 60 bp, Homo sapiens
tcatgactgtccaatctttgaggaatcttcgagaccatcctggtaatacaatgaaaccct

SEQ ID NO: 4342 - DNA, 60 bp, Homo sapiens
gctcctgtggagtgaccccaaggagccttcgaactcctgactatagttgatccacccacc

SEQ ID NO: 4343 - DNA, 60 bp, Homo sapiens
ttcatttttccactattaaatataaatttcgatctcctggtctcgtgataagcccgcctt

SEQ ID NO: 4344 - DNA, 60 bp, Homo sapiens
caacaagacagaggaaataaaaagtatatcgatctcctgatctcatgatccactggcctc

SEQ ID NO: 4345 - DNA, 60 bp, Homo sapiens
attcatgaaaaatgtgtattttgggaaatcgaactcctgaactcaagtgctccatctgcc

SEQ ID NO: 4346 - DNA, 60 bp, Homo sapiens
tgttcctcttgtgaattctcatttcagttcgaactcctgacttcggtgatctacctgccg

SEQ ID NO: 4347 - DNA, 60 bp, Homo sapiens
tctatcaactgctttaaaattataaaagtcgaactcctgatttcaagtgatccatctgcc

SEQ ID NO: 4348 - DNA, 60 bp, Homo sapiens
agccaaattgttttcttgataggaacattcgatctcctgaccatcctgatccaccagcct

SEQ ID NO: 4349 - DNA, 60 bp, Homo sapiens
gatgaaaagacatcacgaggtaaggagatcgatgcaaaaatcctccataaagtactggca

SEQ ID NO: 4350 - DNA, 60 bp, Homo sapiens
atgtaactgttggatcgggggtaaaatttcgaactcctgaccttatgcaatccacttgcc

SEQ ID NO: 4351 - DNA, 60 bp, Homo sapiens
aagttcagactaatatccctgatgaacatcgagaccctcgtgttagagggctgtcagatc

SEQ ID NO: 4352 - DNA, 60 bp, Homo sapiens
cccctatgtggaattatgtagttatctctcgagaccagcctagctaatgtggtgaaattc

SEQ ID NO: 4353 - DNA, 60 bp, Homo sapiens
tacagtttaattctaaaaatatgtattttcgaactcctgacctgaggcaatctgctggcc

SEQ ID NO: 4354 - DNA, 60 bp, Homo sapiens
caaataaaatatctaaacaaaatttcagtcgatctcttgaccttgtaatatgcccatctc

SEQ ID NO: 4355 - DNA, 22 bp, Homo sapiens
cccttagctctgcactggggtt

SEQ ID NO: 4356 - DNA, 22 bp, Homo sapiens
aataatgaaaactctgtcatgc

SEQ ID NO: 4357 - DNA, 25 bp, Homo sapiens
atgtgtgtataaaaggaagaaaaaa

SEQ ID NO: 4358 - DNA, 25 bp, Homo sapiens
aacataaaaatcttaggtgagtcca

SEQ ID NO: 4359 - DNA, 24 bp, Homo sapiens
gaacataaaaacacggaagggatg

SEQ ID NO: 4360 - DNA, 24 bp, Homo sapiens
cccagaggccagctcagaccgggt

SEQ ID NO: 4361 - DNA, 21 bp, Homo sapiens
catgtgtcagtacttcattcc

SEQ ID NO: 4362 - DNA, 21 bp, Homo sapiens
aatataatttctacagatgaa

SEQ ID NO: 4363 - DNA, 22 bp, Homo sapiens
tgattgcacagattcctccttg

SEQ ID NO: 4364 - DNA, 22 bp, Homo sapiens
aaaaagagtgaagaaggcctac

SEQ ID NO: 4365 - DNA, 24 bp, Homo sapiens
ttataaaatgcactttatacacct

SEQ ID NO: 4366 - DNA, 24 bp, Homo sapiens
atttctgttacagtgaaaaaatac

SEQ ID NO: 4367 - DNA, 23 bp, Homo sapiens
tcttgaaagagaaaatatataat

SEQ ID NO: 4368 - DNA, 23 bp, Homo sapiens
cttgaagtagcgagtaaaacaaa

SEQ ID NO: 4369 - DNA, 24 bp, Homo sapiens
ccatgaaactcaaagaacatttca

SEQ ID NO: 4370 - DNA, 24 bp, Homo sapiens
agtgtaagtatgtctcatgcaata

SEQ ID NO: 4371 - DNA, 24 bp, Homo sapiens
tctatataccaacagcgaccaagc

SEQ ID NO: 4372 - DNA, 24 bp, Homo sapiens
tgttatagctgtattccatatttt

SEQ ID NO: 4373 - DNA, 23 bp, Homo sapiens
ctgcctcatatggctgatcatat

SEQ ID NO: 4374 - DNA, 23 bp, Homo sapiens
ggttctctgttctcaatcaggcc

SEQ ID NO: 4375 - DNA, 24 bp, Homo sapiens
ttaagatatacttgcattttactt

SEQ ID NO: 4376 - DNA, 24 bp, Homo sapiens
catgtatctgatgtgtaggtatta

SEQ ID NO: 4377 - DNA, 22 bp, Homo sapiens
tactgagattctgttaaagacc

SEQ ID NO: 4378 - DNA, 22 bp, Homo sapiens
aaaatgaaaagagatgctctga

SEQ ID NO: 4379 - DNA, 25 bp, Homo sapiens
aatctgaaatagcaccaatagctaa

SEQ ID NO: 4380 - DNA, 25 bp, Homo sapiens
tctctctctccttttatttattttt

SEQ ID NO: 4381 - DNA, 22 bp, Homo sapiens
ccctgtcaattaaacaaacaaa

SEQ ID NO: 4382 - DNA, 22 bp, Homo sapiens
caaattttgtgttgagtaactt

SEQ ID NO: 4383 - DNA, 25 bp, Homo sapiens
ttaagccctggatcttgaccccctt

SEQ ID NO: 4384 - DNA, 25 bp, Homo sapiens
atgttcttggcaagtcctggatggg

SEQ ID NO: 4385 - DNA, 24 bp, Homo sapiens
tccagtgggacttgttccaaactg

SEQ ID NO: 4386 - DNA, 24 bp, Homo sapiens
aatgacatcggtactatctccatg

SEQ ID NO: 4387 - DNA, 23 bp, Homo sapiens
aaaagtctcaattttaatcatag

SEQ ID NO: 4388 - DNA, 23 bp, Homo sapiens
tttgaaaccaacgagaacaaaga

SEQ ID NO: 4389 - DNA, 22 bp, Homo sapiens
gatattattcaaagattatcat

SEQ ID NO: 4390 - DNA, 22 bp, Homo sapiens
ctgggagtaataatatgaaggg

SEQ ID NO: 4391 - DNA, 23 bp, Homo sapiens
tgaccacctagatatacagcagg

SEQ ID NO: 4392 - DNA, 23 bp, Homo sapiens
aacttctacttgaattggaggga

SEQ ID NO: 4393 - DNA, 21 bp, Homo sapiens
cagcccccaacacaaagaatt

SEQ ID NO: 4394 - DNA, 21 bp, Homo sapiens
cttcaaactcctgggttcaag

SEQ ID NO: 4395 - DNA, 21 bp, Homo sapiens
ttcttcctagtcagtcatact

SEQ ID NO: 4396 - DNA, 21 bp, Homo sapiens
atgatgatgaataagtcactt

SEQ ID NO: 4397 - DNA, 25 bp, Homo sapiens
aaacatatgaaaccttcaaaaaagt

SEQ ID NO: 4398 - DNA, 25 bp, Homo sapiens
ggactcttctagggaaaaaaagtcc

SEQ ID NO: 4399 - DNA, 25 bp, Homo sapiens
tatacaccaacaacaaccaagctga

SEQ ID NO: 4400 - DNA, 25 bp, Homo sapiens
tcggagtccttaaaacactccaatc

SEQ ID NO: 4401 - DNA, 21 bp, Homo sapiens
tataattttagattccgttaa

SEQ ID NO: 4402 - DNA, 21 bp, Homo sapiens
agcctcaaaatttgtggggct

SEQ ID NO: 4403 - DNA, 25 bp, Homo sapiens
acactgcacccttaaccctacccgc

SEQ ID NO: 4404 - DNA, 25 bp, Homo sapiens
atataagaagataaaatgcttacaa

SEQ ID NO: 4405 - DNA, 26 bp, Homo sapiens
gtgtcggtacttgataatatttgttg

SEQ ID NO: 4406 - DNA, 26 bp, Homo sapiens
aaactgtgtacacttcaggacccaca

SEQ ID NO: 4407 - DNA, 21 bp, Homo sapiens
aactaggcaattacaattgtg

SEQ ID NO: 4408 - DNA, 21 bp, Homo sapiens
aggaggcttcagtgaaaacta

SEQ ID NO: 4409 - DNA, 23 bp, Homo sapiens
gtctgggtccctgaatgactctg

SEQ ID NO: 4410 - DNA, 23 bp, Homo sapiens
tatacttaaatgagcatggctgt

SEQ ID NO: 4411 - DNA, 22 bp, Homo sapiens
gaggtcccagcactttcgcacc

SEQ ID NO: 4412 - DNA, 22 bp, Homo sapiens
ctcacatgtgtcgccatgcaaa

SEQ ID NO: 4413 - DNA, 21 bp, Homo sapiens
gctgggaggcttttggagcag

SEQ ID NO: 4414 - DNA, 21 bp, Homo sapiens
atgttacattgctgcaggcaa

SEQ ID NO: 4415 - DNA, 25 bp, Homo sapiens
gtatgtcatggaatgccatagaagc

SEQ ID NO: 4416 - DNA, 25 bp, Homo sapiens
acactgtcagaaaaggtctagaata

SEQ ID NO: 4417 - DNA, 21 bp, Homo sapiens
tccttgtcattccccatgagc

SEQ ID NO: 4418 - DNA, 21 bp, Homo sapiens
taatagagaacaaacagtata

SEQ ID NO: 4419 - DNA, 22 bp, Homo sapiens
aatctgtattgcctttctactt

SEQ ID NO: 4420 - DNA, 22 bp, Homo sapiens
cttacttccacttcatgtagct

SEQ ID NO: 4421 - DNA, 24 bp, Homo sapiens
catgttagtgaaataagccaggca

SEQ ID NO: 4422 - DNA, 24 bp, Homo sapiens
tttaactcatatatgggcatatgc

SEQ ID NO: 4423 - DNA, 23 bp, Homo sapiens
tctccaaggccccagcagagtaa

SEQ ID NO: 4424 - DNA, 23 bp, Homo sapiens
ctcctgacctcatgatcctcctg

SEQ ID NO: 4425 - DNA, 25 bp, Homo sapiens
gccttgacctctcaaaatgctggga

SEQ ID NO: 4426 - DNA, 25 bp, Homo sapiens
catttgatctttgacaaagttgaca

SEQ ID NO: 4427 - DNA, 24 bp, Homo sapiens
atgtgagtaagataaatgtataca

SEQ ID NO: 4428 - DNA, 24 bp, Homo sapiens
atcattaagcaaataaatttttgc

SEQ ID NO: 4429 - DNA, 26 bp, Homo sapiens
cgcaggtgaggccgctgggggtatca

SEQ ID NO: 4430 - DNA, 26 bp, Homo sapiens
ctacctacctagtccctgctgctaca

SEQ ID NO: 4431 - DNA, 21 bp, Homo sapiens
atgtttcctgtttatttctca

SEQ ID NO: 4432 - DNA, 21 bp, Homo sapiens
cgccattctcctgcctcagcc

SEQ ID NO: 4433 - DNA, 26 bp, Homo sapiens
ccttggcctcaggcccagagcaaggc

SEQ ID NO: 4434 - DNA, 26 bp, Homo sapiens
taaccctagaagatggttacaagcat

SEQ ID NO: 4435 - DNA, 22 bp, Homo sapiens
aggtggcaggccagtggtgctc

SEQ ID NO: 4436 - DNA, 22 bp, Homo sapiens
aatattgacattataaaagaca

SEQ ID NO: 4437 - DNA, 23 bp, Homo sapiens
acaagaccagaaacagggtaaga

SEQ ID NO: 4438 - DNA, 23 bp, Homo sapiens
tatttcataaatttcaaaagcca

SEQ ID NO: 4439 - DNA, 24 bp, Homo sapiens
cagttagatattaaaacagagtaa

SEQ ID NO: 4440 - DNA, 24 bp, Homo sapiens
caagaccgtaccactgcacaccag

SEQ ID NO: 4441 - DNA, 21 bp, Homo sapiens
aaattaagactgaagttgaaa

SEQ ID NO: 4442 - DNA, 21 bp, Homo sapiens
cttacttccacttcatgtagc

SEQ ID NO: 4443 - DNA, 25 bp, Homo sapiens
tatgagatgaacttttttaagcttc

SEQ ID NO: 4444 - DNA, 25 bp, Homo sapiens
ggttcataaaactaaacaacagata

SEQ ID NO: 4445 - DNA, 21 bp, Homo sapiens
ccccaagttagacttaattct

SEQ ID NO: 4446 - DNA, 21 bp, Homo sapiens
aagaacaaaaaaatgtagata

SEQ ID NO: 4447 - DNA, 25 bp, Homo sapiens
aacagataaaaaagcaaggaaaata

SEQ ID NO: 4448 - DNA, 25 bp, Homo sapiens
ttatgtttattgatttgcgtatgtt

SEQ ID NO: 4449 - DNA, 22 bp, Homo sapiens
agtcctttgtgaagtatcacaa

SEQ ID NO: 4450 - DNA, 22 bp, Homo sapiens
tatatgctttctacctttgaga

SEQ ID NO: 4451 - DNA, 25 bp, Homo sapiens
cttctgaaactattccaaacagtac

SEQ ID NO: 4452 - DNA, 25 bp, Homo sapiens
cgtcaatagacatgcaattgctgcc

SEQ ID NO: 4453 - DNA, 22 bp, Homo sapiens
aatagctagaagagaggatttt

SEQ ID NO: 4454 - DNA, 22 bp, Homo sapiens
tggcaagatctcagctcactgc

SEQ ID NO: 4455 - DNA, 25 bp, Homo sapiens
ggcctgttctttgcacttgcggtgg

SEQ ID NO: 4456 - DNA, 25 bp, Homo sapiens
gaccatcctggccaacatggttgat

SEQ ID NO: 4457 - DNA, 22 bp, Homo sapiens
aaaacaatgttaggttactttc

SEQ ID NO: 4458 - DNA, 22 bp, Homo sapiens
cttttagaaactgaagaatcag

SEQ ID NO: 4459 - DNA, 60 bp, Homo sapiens
ctcttccttagtttactttaagtattagtcgatctccttacctcgtaatctgcctgcata

SEQ ID NO: 4460 - DNA, 60 bp, Homo sapiens
aatttattgaacactcaataggcactaatcgaactcctgacaccagtgatccagcttcct

SEQ ID NO: 4461 - DNA, 60 bp, Homo sapiens
gtagacaagaacacttagaatgctactgtcgaactcctgacctctagagtcaggcctcct

SEQ ID NO: 4462 - DNA, 60 bp, Homo sapiens
aaaaagaaaatgttggatcatttacagatcgaactcctgacctctagagtcaggcctcct

SEQ ID NO: 4463 - DNA, 60 bp, Homo sapiens
gtctaatgcaaggttcttgcagagaacctcgagaccagcctgtgaacacagccaagactt

SEQ ID NO: 4464 - DNA, 60 bp, Homo sapiens
agaactagacccataaatacatttcccatcgaactcctgacctgatctcgggtgatccac

SEQ ID NO: 4465 - DNA, 60 bp, Homo sapiens
ggacatagtcttacttttagtcatagcatcgatctcttgatcccatgatccacctgcctc

SEQ ID NO: 4466 - DNA, 60 bp, Homo sapiens
atggaatactttgccttttctcatgaattcgaactcctgacatcaggcattctgcctgcc

SEQ ID NO: 4467 - DNA, 60 bp, Homo sapiens
tttgttcacctctaacaatgtattttgttcgaactcctgaccgcaggttacctgcccgag

SEQ ID NO: 4468 - DNA, 60 bp, Homo sapiens
aaatattcatcttagatatggcccgtgttcgatctcctggtctcgtgataagcccgcctt

SEQ ID NO: 4469 - DNA, 60 bp, Homo sapiens
aatgacacgctaaaaggaaaaaggaacgtcgaactcctgactatagttgatccacccacc

SEQ ID NO: 4470 - DNA, 60 bp, Homo sapiens
gactttccaggttcctaaatatccattttcgaactcctgacttcttgatctgtccgcctc

SEQ ID NO: 4471 - DNA, 60 bp, Homo sapiens
agtgagtaagttctttgagaatggaatatcgaactcctgacatcaagtgttcctcccacc

SEQ ID NO: 4472 - DNA, 60 bp, Homo sapiens
tcctttagatgaaataatttgtatcatgtcgaactctcaacctcaggtaatcctcccacc

SEQ ID NO: 4473 - DNA, 60 bp, Homo sapiens
ttttttatacatataattaaggtatatttcgaactcctgacttcatgatacacccacctt

SEQ ID NO: 4474 - DNA, 60 bp, Homo sapiens
gtatttttcttcattttggagcttcaggtcgaactcctgagctcaggttatccacctgcc

SEQ ID NO: 4475 - DNA, 60 bp, Homo sapiens
tcacagggatttttttttaaccataatttcgaactcctgactgcaggtgttccacctgcc

SEQ ID NO: 4476 - DNA, 60 bp, Homo sapiens
aaaaacactgattgtaattaatgtgaagtcgaactcttgacctctggtgatctacccacc

SEQ ID NO: 4477 - DNA, 60 bp, Homo sapiens
agaattaacattttaaattatggagagttcgaactcctggcctcaggtgatatccatctg

SEQ ID NO: 4478 - DNA, 60 bp, Homo sapiens
gaaatgacctcttgctggttgcagtaagtcgatctcctgaccctgtgaaccacacgcctc

SEQ ID NO: 4479 - DNA, 60 bp, Homo sapiens
ctgatacatgctataacagagatgaacttcgatctcttgaccttgtaatccatcctcctt

SEQ ID NO: 4480 - DNA, 60 bp, Homo sapiens
cttcatttggttaacatggtgtacaacatcgaactcctgatcctgggtgatccaccagcc

SEQ ID NO: 4481 - DNA, 60 bp, Homo sapiens
gagtcatttattgattcaggaatatttgtcgaactcctgactgcaggtgttccacctgcc

SEQ ID NO: 4482 - DNA, 60 bp, Homo sapiens
aatgtgtcagaaacctcatctttaatcttcgaactcctgacctaaagcgatctgtctgcc

SEQ ID NO: 4483 - DNA, 60 bp, Homo sapiens
ggtgcgaaatctgaaataatggcagaagtcgaactcctgacctcatgatcctctcacctc

SEQ ID NO: 4484 - DNA, 60 bp, Homo sapiens
cagcatgtttttttgtgcacactaaagttcgatttcctgacctcgtgatctccacctgcc

SEQ ID NO: 4485 - DNA, 60 bp, Homo sapiens
taaatcttaggccttaacccccatgaattcgatctcctgaccttgtgctctgcccatctc

SEQ ID NO: 4486 - DNA, 60 bp, Homo sapiens
atttaaccctcgcaataaccatctgaggtcgatctcctgacctcgtaatctacctgcctc

SEQ ID NO: 4487 - DNA, 60 bp, Homo sapiens
tttctttttttttctttttttttttttttcgaactcctgacctcatgatcctctcacctc

SEQ ID NO: 4488 - DNA, 60 bp, Homo sapiens
tttgccagatcaggtggctacagggaagtcgatctcctgacctcgtgactggcccacctc

SEQ ID NO: 4489 - DNA, 60 bp, Homo sapiens
atttaattctcacaatagcgtgaggaggtcgaactcctgaccttgtatccacccacctcg

SEQ ID NO: 4490 - DNA, 60 bp, Homo sapiens
tcatttctatggaaagtgggtgacacagtcgaactcctgaccaaaaagtgatccacccgc

SEQ ID NO: 4491 - DNA, 60 bp, Homo sapiens
ccagattgattatccctcaaggtaagcatcgaacttctgacctcagaatgatccgcctgc

SEQ ID NO: 4492 - DNA, 60 bp, Homo sapiens
caaaaatttttcctcattacatctgccctcgagaccatcctgaccaacatgttgaaaccc

SEQ ID NO: 4493 - DNA, 60 bp, Homo sapiens
gaaaaaattagggaagaattaggaaaaatcgagaccagcctgatgaacctggtgaaaccc

SEQ ID NO: 4494 - DNA, 60 bp, Homo sapiens
aattatttttaataatgtaaaaggcaactcgagaccagcctcggcagtgtgacaaaaccc

SEQ ID NO: 4495 - DNA, 60 bp, Homo sapiens
aaagtatgaatttagagatgaaaaatcttcgaactcctgactgcaggtgttccacctgcc

SEQ ID NO: 4496 - DNA, 60 bp, Homo sapiens
agacgggggtctcaccattaggctggtctcgatgttcatcagggatattggtctaaaatt

SEQ ID NO: 4497 - DNA, 60 bp, Homo sapiens
tagctccaataaccttgagccaacctagtcgatctcctgacctcatgatcttcccacctt

SEQ ID NO: 4498 - DNA, 60 bp, Homo sapiens
tatttgaaagttcaagatttttgagctttcgatctcctggtctcgtgataagcccgcctt

SEQ ID NO: 4499 - DNA, 60 bp, Homo sapiens
aacagttgtcatctatgtaatggacacatcgaactcctgacatcaggtgctccacctgcc

SEQ ID NO: 4500 - DNA, 60 bp, Homo sapiens
tttttcagatgaaacaatgcatggactgtcgagaccatactggccaacaaggtaaaaccc

SEQ ID NO: 4501 - DNA, 60 bp, Homo sapiens
gtttcttaccactatgaataccctgatgtcgatctcctgacatgtgatccaccctcctca

SEQ ID NO: 4502 - DNA, 60 bp, Homo sapiens
cattcaaaagatgtctgttcttcccaagtcgaactcctgggctcttgatccttccgactc

SEQ ID NO: 4503 - DNA, 60 bp, Homo sapiens
taggctattttttcccactgatgaaatgtcgaactcctgagctcaggtgacccatgtgcc

SEQ ID NO: 4504 - DNA, 60 bp, Homo sapiens
gccactaccgtattttaactgcaaaaagtcgatctcctgaccttgtgatcttcccacctc

SEQ ID NO: 4505 - DNA, 60 bp, Homo sapiens
ttttagcatgaagagttgttgaattttgtcgatctcctgacctcgtgatttacttaggtg

SEQ ID NO: 4506 - DNA, 60 bp, Homo sapiens
tgagctcttctgagaaaccagagcccagtcgatctcctgaccttgtgatcttcccacctc

SEQ ID NO: 4507 - DNA, 60 bp, Homo sapiens
aatgttctgtggtatgcccacagcctcatcgaactcctgacctcagatgaactccacctg

SEQ ID NO: 4508 - DNA, 60 bp, Homo sapiens
tgttgtcattctgggattagaagtcgcttcgaactcctgacctcatgtagtccacctgcc

SEQ ID NO: 4509 - DNA, 60 bp, Homo sapiens
cagtgatgtgtctccttttttttttttttcgatctcctgaccttgtgatctcaccttggc

SEQ ID NO: 4510 - DNA, 60 bp, Homo sapiens
tcattttaccgagtgtaaattgttgttttcgatctcttgatgttgtgatccacctgcctc

SEQ ID NO: 4511 - DNA, 25 bp, Homo sapiens
ttcatgtagtttgacattgacagtt

SEQ ID NO: 4512 - DNA, 25 bp, Homo sapiens
agaggcatgagccacagcgcccagc

SEQ ID NO: 4513 - DNA, 24 bp, Homo sapiens
taaaaaattttaaaagtttggatg

SEQ ID NO: 4514 - DNA, 24 bp, Homo sapiens
aacagtataaatctcactgataaa

SEQ ID NO: 4515 - DNA, 23 bp, Homo sapiens
attaccaagaattcaagggagaa

SEQ ID NO: 4516 - DNA, 23 bp, Homo sapiens
acttctccagggactttcattat

SEQ ID NO: 4517 - DNA, 21 bp, Homo sapiens
agacctaccagatggaagctg

SEQ ID NO: 4518 - DNA, 21 bp, Homo sapiens
tacttctccagggactttcat

SEQ ID NO: 4519 - DNA, 21 bp, Homo sapiens
tctttggagcagagagttgct

SEQ ID NO: 4520 - DNA, 21 bp, Homo sapiens
ttattttttttagagacaggg

SEQ ID NO: 4521 - DNA, 23 bp, Homo sapiens
aaaagaaacatgatcctggataa

SEQ ID NO: 4522 - DNA, 23 bp, Homo sapiens
tgggggaacaggttaagactgca

SEQ ID NO: 4523 - DNA, 22 bp, Homo sapiens
aaccatctcatggtaatagtat

SEQ ID NO: 4524 - DNA, 22 bp, Homo sapiens
gaagaaaacattctgaatatat

SEQ ID NO: 4525 - DNA, 25 bp, Homo sapiens
tattgtgttttgagcctcatcagaa

SEQ ID NO: 4526 - DNA, 25 bp, Homo sapiens
tatttgcattttgttttatgaacaa

SEQ ID NO: 4527 - DNA, 21 bp, Homo sapiens
tggggtgggaggtgaaggggc

SEQ ID NO: 4528 - DNA, 21 bp, Homo sapiens
caggctggtcttaaactcctt

SEQ ID NO: 4529 - DNA, 25 bp, Homo sapiens
tataaacatatatttttatatgtta

SEQ ID NO: 4530 - DNA, 25 bp, Homo sapiens
attgacattataaaagacagtaaaa

SEQ ID NO: 4531 - DNA, 21 bp, Homo sapiens
ggatggatgtgggaatggatg

SEQ ID NO: 4532 - DNA, 21 bp, Homo sapiens
acgaatcctcccagtaaccct

SEQ ID NO: 4533 - DNA, 25 bp, Homo sapiens
ctatatatataactatatatataac

SEQ ID NO: 4534 - DNA, 25 bp, Homo sapiens
ggttttgatgcttccataatagcta

SEQ ID NO: 4535 - DNA, 26 bp, Homo sapiens
cattccattaacaaatatatgtgtat

SEQ ID NO: 4536 - DNA, 26 bp, Homo sapiens
agtctgttatgctcactgctatttgt

SEQ ID NO: 4537 - DNA, 25 bp, Homo sapiens
ctgagatggcgccactgcactccag

SEQ ID NO: 4538 - DNA, 25 bp, Homo sapiens
gtaacagttggaagaaagaatgcta

SEQ ID NO: 4539 - DNA, 23 bp, Homo sapiens
tgatagctgaaaaaaactgtaaa

SEQ ID NO: 4540 - DNA, 23 bp, Homo sapiens
ggtaaaagcatatcagttctagt

SEQ ID NO: 4541 - DNA, 22 bp, Homo sapiens
ctgtacatattttgacatttgt

SEQ ID NO: 4542 - DNA, 22 bp, Homo sapiens
tgcttaaaagtaatgacttcta

SEQ ID NO: 4543 - DNA, 24 bp, Homo sapiens
gaaatgggtgagtttctaggaaaa

SEQ ID NO: 4544 - DNA, 24 bp, Homo sapiens
tatttggactggttcacctttcaa

SEQ ID NO: 4545 - DNA, 21 bp, Homo sapiens
gtgtgttcacctgtataatac

SEQ ID NO: 4546 - DNA, 21 bp, Homo sapiens
gggctacaacactgtatagca

SEQ ID NO: 4547 - DNA, 26 bp, Homo sapiens
atctctagtaaaataaatcggctcac

SEQ ID NO: 4548 - DNA, 26 bp, Homo sapiens
aacacagacacatcacacactcaaga

SEQ ID NO: 4549 - DNA, 23 bp, Homo sapiens
tttctttccatttccaagggtaa

SEQ ID NO: 4550 - DNA, 23 bp, Homo sapiens
gtctcccctgttagtttttaata

SEQ ID NO: 4551 - DNA, 23 bp, Homo sapiens
tcataaaagccccaaagcgaaac

SEQ ID NO: 4552 - DNA, 23 bp, Homo sapiens
tggcaggtatgtcaccataaacc

SEQ ID NO: 4553 - DNA, 24 bp, Homo sapiens
tcctacatggccattgttatgttg

SEQ ID NO: 4554 - DNA, 24 bp, Homo sapiens
taacatcagaggattgtggtttta

SEQ ID NO: 4555 - DNA, 21 bp, Homo sapiens
cgcctgcacaattggttccac

SEQ ID NO: 4556 - DNA, 21 bp, Homo sapiens
acctttcaagcccttcaggtc

SEQ ID NO: 4557 - DNA, 24 bp, Homo sapiens
gcccaatgaccttcaatgcaaacc

SEQ ID NO: 4558 - DNA, 24 bp, Homo sapiens
cctcccaaagtgccagaattacag

SEQ ID NO: 4559 - DNA, 21 bp, Homo sapiens
ggaataatacttactacttgg

SEQ ID NO: 4560 - DNA, 21 bp, Homo sapiens
taatcccggcaatttgggagg

SEQ ID NO: 4561 - DNA, 24 bp, Homo sapiens
gctttctaatcttttaagagattg

SEQ ID NO: 4562 - DNA, 24 bp, Homo sapiens
cttgagtccaggacgtcaagactg

SEQ ID NO: 4563 - DNA, 25 bp, Homo sapiens
atagtagttttgttttttgtttttt

SEQ ID NO: 4564 - DNA, 25 bp, Homo sapiens
tgtttaggcatagaatagactttga

SEQ ID NO: 4565 - DNA, 22 bp, Homo sapiens
ttactaacaaaaatagcaacaa

SEQ ID NO: 4566 - DNA, 22 bp, Homo sapiens
aagtccagactgcagtaagtca

SEQ ID NO: 4567 - DNA, 26 bp, Homo sapiens
cttgtctagttttgttgttacttttt

SEQ ID NO: 4568 - DNA, 26 bp, Homo sapiens
aatcccggcaatttgggaggctgcgg

SEQ ID NO: 4569 - DNA, 24 bp, Homo sapiens
gggtttctctcgttgcaccatctt

SEQ ID NO: 4570 - DNA, 24 bp, Homo sapiens
atgtgtctgtatgtagagcgtatg

SEQ ID NO: 4571 - DNA, 25 bp, Homo sapiens
gtcaacagccttattgatcccagag

SEQ ID NO: 4572 - DNA, 25 bp, Homo sapiens
acatagtaagtccttgtctctaaaa

SEQ ID NO: 4573 - DNA, 23 bp, Homo sapiens
gcctggtggaaaagggagaaaca

SEQ ID NO: 4574 - DNA, 23 bp, Homo sapiens
tggggtatggggagttagtgttt

SEQ ID NO: 4575 - DNA, 22 bp, Homo sapiens
gcctctgtgagctaccaccact

SEQ ID NO: 4576 - DNA, 22 bp, Homo sapiens
catgtaaccaaacaccacctgt

SEQ ID NO: 4577 - DNA, 21 bp, Homo sapiens
tccattgtgtctgtttcattt

SEQ ID NO: 4578 - DNA, 21 bp, Homo sapiens
ggctcactgcaacctctgcct

SEQ ID NO: 4579 - DNA, 24 bp, Homo sapiens
ctaacaaaatgaattttaagataa

SEQ ID NO: 4580 - DNA, 24 bp, Homo sapiens
ttaatattttttctaataggagca

SEQ ID NO: 4581 - DNA, 21 bp, Homo sapiens
actacatatgcaaacatgtat

SEQ ID NO: 4582 - DNA, 21 bp, Homo sapiens
gatcttggctcactgcaacct

SEQ ID NO: 4583 - DNA, 26 bp, Homo sapiens
ggcacaggtctccacagatgttaatt

SEQ ID NO: 4584 - DNA, 26 bp, Homo sapiens
cagttttctcttctataaaatgagat

SEQ ID NO: 4585 - DNA, 23 bp, Homo sapiens
tgcaacctccacctcccgggctc

SEQ ID NO: 4586 - DNA, 23 bp, Homo sapiens
actattccaatcaatagaaaaag

SEQ ID NO: 4587 - DNA, 26 bp, Homo sapiens
agcctcacaagggtagggacttaatt

SEQ ID NO: 4588 - DNA, 26 bp, Homo sapiens
cagcactttgggaggccaaggcaggt

SEQ ID NO: 4589 - DNA, 22 bp, Homo sapiens
tataattttatatgaaaaaaat

SEQ ID NO: 4590 - DNA, 22 bp, Homo sapiens
gaatccacattttaaaaaaagc

SEQ ID NO: 4591 - DNA, 25 bp, Homo sapiens
tatttttaattgccttggactttat

SEQ ID NO: 4592 - DNA, 25 bp, Homo sapiens
aacgacaaccaaaacaaaaacaaaa

SEQ ID NO: 4593 - DNA, 25 bp, Homo sapiens
aaaaaggaagcagtctttttttagt

SEQ ID NO: 4594 - DNA, 25 bp, Homo sapiens
ctagctctgttgccaggctggagtt

SEQ ID NO: 4595 - DNA, 24 bp, Homo sapiens
tttgtaaccagtatgaattctgtt

SEQ ID NO: 4596 - DNA, 24 bp, Homo sapiens
gggaagactgtttggcatatagcg

SEQ ID NO: 4597 - DNA, 26 bp, Homo sapiens
caaaatcggtatgaagaaaattttga

SEQ ID NO: 4598 - DNA, 26 bp, Homo sapiens
aaaaagggtgttttctaatatgtcat

SEQ ID NO: 4599 - DNA, 22 bp, Homo sapiens
gtacatacacctttatgctctg

SEQ ID NO: 4600 - DNA, 22 bp, Homo sapiens
ttctaaaaaatacacaggagta

SEQ ID NO: 4601 - DNA, 24 bp, Homo sapiens
ggaaactcatactgtttgaaccac

SEQ ID NO: 4602 - DNA, 24 bp, Homo sapiens
ccagcacttttggaggccaaagca

SEQ ID NO: 4603 - DNA, 25 bp, Homo sapiens
gatattggctgtgggtttgtcatag

SEQ ID NO: 4604 - DNA, 25 bp, Homo sapiens
agcaaatcatatatgtcaggcaagt

SEQ ID NO: 4605 - DNA, 24 bp, Homo sapiens
gcatgaaaggtgacgggagaaagg

SEQ ID NO: 4606 - DNA, 24 bp, Homo sapiens
ccagcacttttggaggccaaagca

SEQ ID NO: 4607 - DNA, 22 bp, Homo sapiens
caatctcctacaacttccatta

SEQ ID NO: 4608 - DNA, 22 bp, Homo sapiens
ataaagaataaataaattgaaa

SEQ ID NO: 4609 - DNA, 21 bp, Homo sapiens
gaaaatctgaaaggaaggacc

SEQ ID NO: 4610 - DNA, 21 bp, Homo sapiens
gccgtgatcgtgccagtgctc

SEQ ID NO: 4611 - DNA, 25 bp, Homo sapiens
gggggaccctaggctaaggcaagtg

SEQ ID NO: 4612 - DNA, 25 bp, Homo sapiens
agagagggctgggcagggtggctca

SEQ ID NO: 4613 - DNA, 23 bp, Homo sapiens
cacacacagaaaactcaaggctg

SEQ ID NO: 4614 - DNA, 23 bp, Homo sapiens
catactgttctttgttgagcatc

SEQ ID NO: 4615 - DNA, 60 bp, Homo sapiens
aagaacacctagaaatgtggctttggagtcgaactcctgacctcaaatggtcagcccacc

SEQ ID NO: 4616 - DNA, 60 bp, Homo sapiens
caaattgattctatccaaaaagaataattcgaactcctgacctcaaatggtcagcccacc

SEQ ID NO: 4617 - DNA, 60 bp, Homo sapiens
tttggggttgaggaatatgttcacaatctcgaggaatttatccatttcttctagattttc

SEQ ID NO: 4618 - DNA, 60 bp, Homo sapiens
taaaaattaacaccatgtaacactaaaatcgaactcctgacctcaggtgaggtgatccac

SEQ ID NO: 4619 - DNA, 60 bp, Homo sapiens
tatttgaaagttcaagatttttgagctttcgatctcctgacctcgtgatgaacccacccc

SEQ ID NO: 4620 - DNA, 60 bp, Homo sapiens
gatttagaaagaagaatcaatggctatatcgaactcctggccttaagccactcacctgct

SEQ ID NO: 4621 - DNA, 60 bp, Homo sapiens
ctgggttggttactgaaacagaaaaaggtcgaactcctgatctcaagttatacacctgcc

SEQ ID NO: 4622 - DNA, 60 bp, Homo sapiens
gttttatattttaaatggcttttgataatcgaactcctgacctcaggtaatccattactt

SEQ ID NO: 4623 - DNA, 60 bp, Homo sapiens
gattaaaagtgctttatctacataagattcgaactcctgacctcaggttatcggcctacc

SEQ ID NO: 4624 - DNA, 60 bp, Homo sapiens
ttgtcaatcaaactgatagagagcttcatcgaactcctgacgtcaggtgatccatcagcc

SEQ ID NO: 4625 - DNA, 60 bp, Homo sapiens
aagttgtcatttgaatgagataaggacctcgagaccagcctgaacaatatgatgaaaccc

SEQ ID NO: 4626 - DNA, 60 bp, Homo sapiens
ttcttctttaatgctgtttgaaacaaaatcgaactcctgacctcaagttatccaaccgct

SEQ ID NO: 4627 - DNA, 60 bp, Homo sapiens
attttcatagcctgctcccatgaagcattcgaactcctgactttgggtgatccactcacc

SEQ ID NO: 4628 - DNA, 60 bp, Homo sapiens
ccagaagccaaaaatgatgatgatgaagtcgaactcctggcctcagatgatctatccacc

SEQ ID NO: 4629 - DNA, 60 bp, Homo sapiens
tcatgtggtgggatatactaggtatgaatcgagaccagcctggtcaaaatgttggaaccc

SEQ ID NO: 4630 - DNA, 60 bp, Homo sapiens
aatgtttggagactgccacatcgttttgtcgatctcctgatctcatgatccactggcctc

SEQ ID NO: 4631 - DNA, 60 bp, Homo sapiens
acccagatgtgctctttcctcttgattatcgaactcctgacctcctgattcatccacctc

SEQ ID NO: 4632 - DNA, 60 bp, Homo sapiens
ccttatctccttgaaggatggagcctcttcgaactcctgatctcatgttccgcccacctc

SEQ ID NO: 4633 - DNA, 60 bp, Homo sapiens
gcgctttttcaaagtcctgttcagcccttcgatctcctgacctcatgattctcctgcctc

SEQ ID NO: 4634 - DNA, 60 bp, Homo sapiens
agctccacccagaggctcagatccatcatcgaactcctgacctcaattgatccatttgcc

SEQ ID NO: 4635 - DNA, 60 bp, Homo sapiens
tcgtgtaatagccagcgataagatccagtcgaactcctggccttaagtgatttgtctgcc

SEQ ID NO: 4636 - DNA, 60 bp, Homo sapiens
ttattttagcttctctgacaaggacacttcgatctcttgatcccatgatccacctgcctc

SEQ ID NO: 4637 - DNA, 60 bp, Homo sapiens
taaacattttcattttgcacaaactatttcgatctccttacctcgtaatctgcctgcata

SEQ ID NO: 4638 - DNA, 60 bp, Homo sapiens
gagtttcatcatatttatcaggctggtctcgatgtgcggtgagtcatgatcatgccactg

SEQ ID NO: 4639 - DNA, 60 bp, Homo sapiens
tcacattatgtgattcctcccatcaatgtcgatctcttgacctcgtgatttgctcacctt

SEQ ID NO: 4640 - DNA, 60 bp, Homo sapiens
caacaaatatttactataaaagcggacatcgaactcctgatcttagttgatccgcccgct

SEQ ID NO: 4641 - DNA, 60 bp, Homo sapiens
aagctgcctagaccaaagaataactgagtcgatttcctgacctcgtgatctccacctgcc

SEQ ID NO: 4642 - DNA, 60 bp, Homo sapiens
gactggaagccttatcaataacataaagtcgaattcctgatcttaggtgatccacccacc

SEQ ID NO: 4643 - DNA, 60 bp, Homo sapiens
cggctggccacaatcacgggcccagcagtcgaactcctgacctcaggtaatcttcctgtc

SEQ ID NO: 4644 - DNA, 60 bp, Homo sapiens
tgtgctctgttgaaatataaaatacaagtcgaactactgacctaagtgatccacccacct

SEQ ID NO: 4645 - DNA, 60 bp, Homo sapiens
cctaccccttaattttttaaagtgagcctcgagaccagtctggccatggtgaaaaactgt

SEQ ID NO: 4646 - DNA, 60 bp, Homo sapiens
tatttattcttcaaaaatgggattaacttcgatctcttgacctcaagatccacctgcctc

SEQ ID NO: 4647 - DNA, 60 bp, Homo sapiens
actgtaggatttttcaacgttggcaccatcgaactcctgacctcaggtcacccatctgcc

SEQ ID NO: 4648 - DNA, 60 bp, Homo sapiens
attctatttacagatgaaaggagcgatctcgagaccatcctggctaacccagtgaaaacc

SEQ ID NO: 4649 - DNA, 60 bp, Homo sapiens
aagattagcagcaaaagcgcatgtgatgtcgatcttctgacctcgtgatcttcctgcctc

SEQ ID NO: 4650 - DNA, 60 bp, Homo sapiens
atctaaagatgatttcctatatttttgttcgaactcctgacatgaagagatctgcccacc

SEQ ID NO: 4651 - DNA, 60 bp, Homo sapiens
atgattatatgttttggggttgctcttctcgaactcctgagctcagtgagactcccacct

SEQ ID NO: 4652 - DNA, 60 bp, Homo sapiens
gattctgactaaattctccttcaatgaatcgaactcctgacctcaagtaatttgcccacc

SEQ ID NO: 4653 - DNA, 60 bp, Homo sapiens
aaagcgagccgatcacgaggtcaagagatcgaactcctgacctcgtgattggcccacttt

SEQ ID NO: 4654 - DNA, 60 bp, Homo sapiens
cactggattcctgagtaccccaatgaaatcgatctcttgacctcaagatccacctgcctc

SEQ ID NO: 4655 - DNA, 60 bp, Homo sapiens
ataaagaatatgtggtacatttacacattcgaactccagacctcaagtgattcaccaacc

SEQ ID NO: 4656 - DNA, 60 bp, Homo sapiens
taacacattttttgtatccattcatctttcgaactcctgggctcttgatccttccgactc

SEQ ID NO: 4657 - DNA, 60 bp, Homo sapiens
gatcagcgtgacagaggaaactcgcagatcgaactcctgacctcaagagatccagggatc

SEQ ID NO: 4658 - DNA, 60 bp, Homo sapiens
aatgatccatgcctgtttttgtgcactgtcgatctcttgacctcgtgatttgctcacctt

SEQ ID NO: 4659 - DNA, 60 bp, Homo sapiens
cagggccagaagtgctcaagtagaagcatcgaactcctgaccttgtaatccacctgactc

SEQ ID NO: 4660 - DNA, 60 bp, Homo sapiens
aatctaaaatatgaaaacgatatagacatcgaacgcctgacctcagttgatctacccacc

SEQ ID NO: 4661 - DNA, 60 bp, Homo sapiens
tcagaaacgttccatttcatcaccagagtcgaactcctgacctcaggtgaactacccacc

SEQ ID NO: 4662 - DNA, 60 bp, Homo sapiens
ccaactctctgtttcattttatgcagtgtcgatctcctgactttgtgatccttctgcctc

SEQ ID NO: 4663 - DNA, 60 bp, Homo sapiens
catcctcctaagtgtttgaccaacaaaatcgaactcctgacctcaggtaatcttcctgtc

SEQ ID NO: 4664 - DNA, 60 bp, Homo sapiens
catttttattaaacaatcgttcctgtcatcgaactcctgatcctgggtgatccaccagcc

SEQ ID NO: 4665 - DNA, 60 bp, Homo sapiens
cttcagaacagtaaaaaaaaaaaaaagttcgatctcttgaccttgtaatatgcccatctc

SEQ ID NO: 4666 - DNA, 23 bp, Homo sapiens
tggatgggccactggaactctac

SEQ ID NO: 4667 - DNA, 23 bp, Homo sapiens
ggagaggctatatacatatgggc

SEQ ID NO: 4668 - DNA, 25 bp, Homo sapiens
ggtttcacgaaatacttaatttggc

SEQ ID NO: 4669 - DNA, 25 bp, Homo sapiens
aataggcaataagggtgtgacccag

SEQ ID NO: 4670 - DNA, 25 bp, Homo sapiens
aaggaaagaagccagactaaaaaaa

SEQ ID NO: 4671 - DNA, 25 bp, Homo sapiens
aagaaacaaatagatgccataaaaa

SEQ ID NO: 4672 - DNA, 24 bp, Homo sapiens
taaatatttggttattttcttttt

SEQ ID NO: 4673 - DNA, 24 bp, Homo sapiens
agaactaaataaaattcaaacaaa

SEQ ID NO: 4674 - DNA, 24 bp, Homo sapiens
tgggtttatcatcagatccgctaa

SEQ ID NO: 4675 - DNA, 24 bp, Homo sapiens
tcaatgaaatcacaaacttcctta

SEQ ID NO: 4676 - DNA, 24 bp, Homo sapiens
tatagttttaattatatttgtaaa

SEQ ID NO: 4677 - DNA, 24 bp, Homo sapiens
agcctgagcacggagccttgtgac

SEQ ID NO: 4678 - DNA, 26 bp, Homo sapiens
tgtaggccaaccagaagaaaaaaaaa

SEQ ID NO: 4679 - DNA, 26 bp, Homo sapiens
atgagcttaaaatagcctgttataag

SEQ ID NO: 4680 - DNA, 26 bp, Homo sapiens
tcaaagcatgcttttttcctgtcaaa

SEQ ID NO: 4681 - DNA, 26 bp, Homo sapiens
cagctgaatataagctctagtggggc

SEQ ID NO: 4682 - DNA, 24 bp, Homo sapiens
ttaagtacaaaacaacaaaacata

SEQ ID NO: 4683 - DNA, 24 bp, Homo sapiens
ctagcctgatacatagaaagtttg

SEQ ID NO: 4684 - DNA, 26 bp, Homo sapiens
ggcaaattaccagccttaagacatta

SEQ ID NO: 4685 - DNA, 26 bp, Homo sapiens
cgtatacaaactcaataacagtatgt

SEQ ID NO: 4686 - DNA, 23 bp, Homo sapiens
aggtgtacttgcaagcacttaaa

SEQ ID NO: 4687 - DNA, 23 bp, Homo sapiens
ttttttttgagacagagtttcgt

SEQ ID NO: 4688 - DNA, 21 bp, Homo sapiens
ccctgcaggcaccttgatgtt

SEQ ID NO: 4689 - DNA, 21 bp, Homo sapiens
aaattggagcacaaagtgaca

SEQ ID NO: 4690 - DNA, 26 bp, Homo sapiens
ttagacataaaacaactctatacttg

SEQ ID NO: 4691 - DNA, 26 bp, Homo sapiens
aaaaaatagattttttaaaagctatg

SEQ ID NO: 4692 - DNA, 26 bp, Homo sapiens
gacgtgatgtctgtggccgccgagtg

SEQ ID NO: 4693 - DNA, 26 bp, Homo sapiens
tcttgaggggttgagttagtcacaaa

SEQ ID NO: 4694 - DNA, 26 bp, Homo sapiens
tgaggcattctttactgcaggttttt

SEQ ID NO: 4695 - DNA, 26 bp, Homo sapiens
gtgatggaatctgaccctattgccca

SEQ ID NO: 4696 - DNA, 21 bp, Homo sapiens
agaccaataaaacttgtagtg

SEQ ID NO: 4697 - DNA, 21 bp, Homo sapiens
taattatatagcccctgagag

SEQ ID NO: 4698 - DNA, 23 bp, Homo sapiens
ctctgtgctttgaaatgtggctg

SEQ ID NO: 4699 - DNA, 23 bp, Homo sapiens
aactcatatatgggcatatgccc

SEQ ID NO: 4700 - DNA, 21 bp, Homo sapiens
tgtgtacaccaaagctgagac

SEQ ID NO: 4701 - DNA, 21 bp, Homo sapiens
tcaagactcttaagagacttc

SEQ ID NO: 4702 - DNA, 23 bp, Homo sapiens
tttgcagttggaagaagcaggaa

SEQ ID NO: 4703 - DNA, 23 bp, Homo sapiens
tcccaaagtgctgggattacagg

SEQ ID NO: 4704 - DNA, 25 bp, Homo sapiens
acttagtaggtgtgcttggtgagat

SEQ ID NO: 4705 - DNA, 25 bp, Homo sapiens
ggtgtcagacacgggcctctagggt

SEQ ID NO: 4706 - DNA, 25 bp, Homo sapiens
gagatttggctattgctttctaata

SEQ ID NO: 4707 - DNA, 25 bp, Homo sapiens
taccatttgatctttgacaaagttg

SEQ ID NO: 4708 - DNA, 26 bp, Homo sapiens
taccagacagcattcaaagtgctatt

SEQ ID NO: 4709 - DNA, 26 bp, Homo sapiens
agtcaattaactacagttagtaataa

SEQ ID NO: 4710 - DNA, 21 bp, Homo sapiens
atttttagtagtagattttat

SEQ ID NO: 4711 - DNA, 21 bp, Homo sapiens
gcctcccaaagtgctgggatt

SEQ ID NO: 4712 - DNA, 25 bp, Homo sapiens
tcaagagattcccctgtctcagcct

SEQ ID NO: 4713 - DNA, 25 bp, Homo sapiens
ttccaaatttggctgtgggagtccc

SEQ ID NO: 4714 - DNA, 23 bp, Homo sapiens
aacaggattaattctaatggaaa

SEQ ID NO: 4715 - DNA, 23 bp, Homo sapiens
ggactttagaaggccgagaccag

SEQ ID NO: 4716 - DNA, 21 bp, Homo sapiens
tagcactggaaaggaggctac

SEQ ID NO: 4717 - DNA, 21 bp, Homo sapiens
ctcccccctttctagaggcag

SEQ ID NO: 4718 - DNA, 22 bp, Homo sapiens
gcccatgcctgtcaggcagaag

SEQ ID NO: 4719 - DNA, 22 bp, Homo sapiens
gaggttgaggtgagaggatcac

SEQ ID NO: 4720 - DNA, 26 bp, Homo sapiens
gaaatattggggagatagatatagat

SEQ ID NO: 4721 - DNA, 26 bp, Homo sapiens
ttcctccccaactattttaataattg

SEQ ID NO: 4722 - DNA, 22 bp, Homo sapiens
gaaagatgagaaggtactgagg

SEQ ID NO: 4723 - DNA, 22 bp, Homo sapiens
gagagagagagaaagaaagaaa

SEQ ID NO: 4724 - DNA, 21 bp, Homo sapiens
cagcaaaaccagagggggaac

SEQ ID NO: 4725 - DNA, 21 bp, Homo sapiens
acaaaaatgcatgtatataca

SEQ ID NO: 4726 - DNA, 26 bp, Homo sapiens
cagagagattgggctcaactccctat

SEQ ID NO: 4727 - DNA, 26 bp, Homo sapiens
gtttcattgagagacagtctcacact

SEQ ID NO: 4728 - DNA, 22 bp, Homo sapiens
tctagcaatacttgtcagcttt

SEQ ID NO: 4729 - DNA, 22 bp, Homo sapiens
attttcatgtaatcactaccac

SEQ ID NO: 4730 - DNA, 22 bp, Homo sapiens
ctaaaatgtacatggatatgca

SEQ ID NO: 4731 - DNA, 22 bp, Homo sapiens
ccttcaggcagaagtaaaatga

SEQ ID NO: 4732 - DNA, 25 bp, Homo sapiens
ggtcaacagctttcaaagacttaaa

SEQ ID NO: 4733 - DNA, 25 bp, Homo sapiens
tttttttttttttgagacggcgtct

SEQ ID NO: 4734 - DNA, 22 bp, Homo sapiens
ttaaggtttgtgtactttactg

SEQ ID NO: 4735 - DNA, 22 bp, Homo sapiens
aaacattagcttcaccaaagaa

SEQ ID NO: 4736 - DNA, 26 bp, Homo sapiens
tcacagcatccatgcactgttttcat

SEQ ID NO: 4737 - DNA, 26 bp, Homo sapiens
tagttgttttgtaaacataaagcatt

SEQ ID NO: 4738 - DNA, 21 bp, Homo sapiens
tacagggtttctgcagagaga

SEQ ID NO: 4739 - DNA, 21 bp, Homo sapiens
tagaggatgatatttcaacat

SEQ ID NO: 4740 - DNA, 23 bp, Homo sapiens
aagtttttaatatctattttttt

SEQ ID NO: 4741 - DNA, 23 bp, Homo sapiens
tgtagagatggggtctcactata

SEQ ID NO: 4742 - DNA, 22 bp, Homo sapiens
atattttaatctataaagtgaa

SEQ ID NO: 4743 - DNA, 22 bp, Homo sapiens
caaagcgttcaacttcacagca

SEQ ID NO: 4744 - DNA, 26 bp, Homo sapiens
tctcctgcacaaaggataagccagag

SEQ ID NO: 4745 - DNA, 26 bp, Homo sapiens
agtacatatatggttctgtgtcatct

SEQ ID NO: 4746 - DNA, 24 bp, Homo sapiens
cattgctgggtatatatccaaaag

SEQ ID NO: 4747 - DNA, 24 bp, Homo sapiens
tttataaaatcgtgtgttttccaa

SEQ ID NO: 4748 - DNA, 22 bp, Homo sapiens
tcacttaacataatgatctcca

SEQ ID NO: 4749 - DNA, 22 bp, Homo sapiens
taccaagtaagtgcagtaataa

SEQ ID NO: 4750 - DNA, 22 bp, Homo sapiens
ctaagaaacttttctctgttaa

SEQ ID NO: 4751 - DNA, 22 bp, Homo sapiens
tagggaactgcaaattaaaaca

SEQ ID NO: 4752 - DNA, 21 bp, Homo sapiens
ccatcctgaatttgttttctt

SEQ ID NO: 4753 - DNA, 21 bp, Homo sapiens
aaggccgagaccagaggattg

SEQ ID NO: 4754 - DNA, 23 bp, Homo sapiens
tctaccaatatttgatgacctac

SEQ ID NO: 4755 - DNA, 23 bp, Homo sapiens
ggccaacttatcacccatatcag

SEQ ID NO: 4756 - DNA, 25 bp, Homo sapiens
tatacaaagccatttctatcaatca

SEQ ID NO: 4757 - DNA, 25 bp, Homo sapiens
tatacaaagccatttctatcaatca

SEQ ID NO: 4758 - DNA, 25 bp, Homo sapiens
gaatgccgaagaccgcgggcccatg

SEQ ID NO: 4759 - DNA, 25 bp, Homo sapiens
tacaacaatagttggagatgttaat

SEQ ID NO: 4760 - DNA, 25 bp, Homo sapiens
agggagacactgactcttacttaca

SEQ ID NO: 4761 - DNA, 25 bp, Homo sapiens
ttcagtgaaaactatgcaaaactta

SEQ ID NO: 4762 - DNA, 25 bp, Homo sapiens
gcctaaacccttcctaccctgaacc

SEQ ID NO: 4763 - DNA, 25 bp, Homo sapiens
agaaagaaagaaagaaagaaagaaa

SEQ ID NO: 4764 - DNA, 23 bp, Homo sapiens
aacagccagccccagactgcgta

SEQ ID NO: 4765 - DNA, 23 bp, Homo sapiens
tggttttactgttctagttttcc

SEQ ID NO: 4766 - DNA, 21 bp, Homo sapiens
gaacaaatatcaagaatatca

SEQ ID NO: 4767 - DNA, 21 bp, Homo sapiens
tctcacaaacctactttcatt

SEQ ID NO: 4768 - DNA, 25 bp, Homo sapiens
tgagatcgtttgtcaacttttactg

SEQ ID NO: 4769 - DNA, 25 bp, Homo sapiens
gatgcgggtgcagcagagcgtaagg

SEQ ID NO: 4770 - DNA, 26 bp, Homo sapiens
taagaaattaatattaaaatatattg

SEQ ID NO: 4771 - DNA, 26 bp, Homo sapiens
gggtaggcccccgggactggctgcgg

SEQ ID NO: 4772 - DNA, 25 bp, Homo sapiens
taacacacctgacttaataggcaca

SEQ ID NO: 4773 - DNA, 25 bp, Homo sapiens
cccgggggcggtgttggggtaggcc

SEQ ID NO: 4774 - DNA, 22 bp, Homo sapiens
agaatgagtttaattatgctaa

SEQ ID NO: 4775 - DNA, 22 bp, Homo sapiens
gggcctgggcgggggttgtgca

SEQ ID NO: 4776 - DNA, 23 bp, Homo sapiens
gcatacacaaacttgttcacaaa

SEQ ID NO: 4777 - DNA, 23 bp, Homo sapiens
aaacttgtatttctcaaataaaa

SEQ ID NO: 4778 - DNA, 23 bp, Homo sapiens
tagtcagagactgaagacttcca

SEQ ID NO: 4779 - DNA, 23 bp, Homo sapiens
ccgggactggctgcggcggggca

SEQ ID NO: 4780 - DNA, 22 bp, Homo sapiens
cagggcggcgtgtgcagcaggt

SEQ ID NO: 4781 - DNA, 22 bp, Homo sapiens
gactaaatggcattaaaagagg

SEQ ID NO: 4782 - DNA, 25 bp, Homo sapiens
aaatgttggatcatttacaaatcaa

SEQ ID NO: 4783 - DNA, 25 bp, Homo sapiens
cttaaggcacaaatacaaaataatg

SEQ ID NO: 4784 - DNA, 21 bp, Homo sapiens
cccgggggcggtgttggggta

SEQ ID NO: 4785 - DNA, 21 bp, Homo sapiens
tattcatgcagccttgatacc

SEQ ID NO: 4786 - DNA, 24 bp, Homo sapiens
aaatatttgggtctgtgcagtaga

SEQ ID NO: 4787 - DNA, 24 bp, Homo sapiens
ctgccaaaatttatacgttgaagt

SEQ ID NO: 4788 - DNA, 21 bp, Homo sapiens
cggaaacagtattattttatt

SEQ ID NO: 4789 - DNA, 21 bp, Homo sapiens
gagcgtaagggcgtctcccgg

SEQ ID NO: 4790 - DNA, 24 bp, Homo sapiens
agacgatttcttttaaaatgtact

SEQ ID NO: 4791 - DNA, 24 bp, Homo sapiens
atgcgggtgcagcagagcgtaagg

SEQ ID NO: 4792 - DNA, 21 bp, Homo sapiens
ctgtgcagtagaaaggcagag

SEQ ID NO: 4793 - DNA, 21 bp, Homo sapiens
caacacgacacctgtatgtac

SEQ ID NO: 4794 - DNA, 22 bp, Homo sapiens
gtgtgtgtctttgctgaactac

SEQ ID NO: 4795 - DNA, 22 bp, Homo sapiens
cagtgactcatccaaggccaca

SEQ ID NO: 4796 - DNA, 22 bp, Homo sapiens
caggaagtgctcctatcttaaa

SEQ ID NO: 4797 - DNA, 22 bp, Homo sapiens
gactggctgcggcggggcaggg

SEQ ID NO: 4798 - DNA, 25 bp, Homo sapiens
gcacagatggttttgaatgtgcttt

SEQ ID NO: 4799 - DNA, 25 bp, Homo sapiens
gtaggcccccgggactggctgcggc

SEQ ID NO: 4800 - DNA, 22 bp, Homo sapiens
agggcctgggtgggggttgtgc

SEQ ID NO: 4801 - DNA, 22 bp, Homo sapiens
taccaattcattttgcaatctc

SEQ ID NO: 4802 - DNA, 24 bp, Homo sapiens
ctcccaaagtgctgggattacagg

SEQ ID NO: 4803 - DNA, 24 bp, Homo sapiens
gcgggtgcagcagagcgtaagggc

SEQ ID NO: 4804 - DNA, 26 bp, Homo sapiens
ccctatagcccttcatgaagttaggt

SEQ ID NO: 4805 - DNA, 26 bp, Homo sapiens
cccgggggcggtgttggggtaggccc

SEQ ID NO: 4806 - DNA, 21 bp, Homo sapiens
gcggcgtgtgcagcaggtaga

SEQ ID NO: 4807 - DNA, 21 bp, Homo sapiens
ctgagatggagaagaatgaaa

SEQ ID NO: 4808 - DNA, 25 bp, Homo sapiens
acagaaacagccaaggtcaacattt

SEQ ID NO: 4809 - DNA, 25 bp, Homo sapiens
actaaattttttatctgtgcctttt

SEQ ID NO: 4810 - DNA, 22 bp, Homo sapiens
ctagacgtgctggcacacacct

SEQ ID NO: 4811 - DNA, 22 bp, Homo sapiens
gggccccaagcagagggcctgg

SEQ ID NO: 4812 - DNA, 23 bp, Homo sapiens
cacatacatactttacattttta

SEQ ID NO: 4813 - DNA, 23 bp, Homo sapiens
tgcggcggggcaggggccccaag

SEQ ID NO: 4814 - DNA, 23 bp, Homo sapiens
gggcggtgttggggtaggccccc

SEQ ID NO: 4815 - DNA, 23 bp, Homo sapiens
agactgtcaatgacaactgtgtc

SEQ ID NO: 4816 - DNA, 26 bp, Homo sapiens
gcagggcggcgtgtgcagcaggtaga

SEQ ID NO: 4817 - DNA, 26 bp, Homo sapiens
aaacacctatgtcaaaaagtatgaaa

SEQ ID NO: 4818 - DNA, 24 bp, Homo sapiens
gtgtgtgtctttgctgaactaccg

SEQ ID NO: 4819 - DNA, 24 bp, Homo sapiens
ctgggtgtggtggtgggcgcctgt

SEQ ID NO: 4820 - DNA, 23 bp, Homo sapiens
gggttgtgcagggcggcgtgtgc

SEQ ID NO: 4821 - DNA, 23 bp, Homo sapiens
agtgctcctatcttaaacacttt

SEQ ID NO: 4822 - DNA, 21 bp, Homo sapiens
gcgtctcccgggggcggtgtt

SEQ ID NO: 4823 - DNA, 21 bp, Homo sapiens
ggagtatactgtgaacaactg

SEQ ID NO: 4824 - DNA, 25 bp, Homo sapiens
caggggccccaagcagagggcctgg

SEQ ID NO: 4825 - DNA, 25 bp, Homo sapiens
ttgcttataattatccagttctttt

SEQ ID NO: 4826 - DNA, 25 bp, Homo sapiens
gctaagtagttaaaggagttcccag

SEQ ID NO: 4827 - DNA, 25 bp, Homo sapiens
ctgggcgggggttgtgcagggcggc

SEQ ID NO: 4828 - DNA, 24 bp, Homo sapiens
ttcactttagcataagcccccaag

SEQ ID NO: 4829 - DNA, 24 bp, Homo sapiens
ggcggtgttggggtaggcccccgg

SEQ ID NO: 4830 - DNA, 24 bp, Homo sapiens
ttggggtaggcccccgggactggc

SEQ ID NO: 4831 - DNA, 24 bp, Homo sapiens
agaagaagcaggccctaggcagag

SEQ ID NO: 4832 - DNA, 26 bp, Homo sapiens
taaaatatttgggtctgtgcagtaga

SEQ ID NO: 4833 - DNA, 26 bp, Homo sapiens
ttttataagctatgaaatgctaaatg

SEQ ID NO: 4834 - DNA, 25 bp, Homo sapiens
tagcactattgttttaaaggtgaga

SEQ ID NO: 4835 - DNA, 25 bp, Homo sapiens
gggcggtgttggggtaggcccccgg

SEQ ID NO: 4836 - DNA, 25 bp, Homo sapiens
cggcggggcaggggccccaagcaga

SEQ ID NO: 4837 - DNA, 25 bp, Homo sapiens
aatgaatgatatatttgatgaaaag

SEQ ID NO: 4838 - DNA, 25 bp, Homo sapiens
gagggcctgggtgggggttgtgcag

SEQ ID NO: 4839 - DNA, 25 bp, Homo sapiens
gtatggtgtaatagtttaggagaga

SEQ ID NO: 4840 - DNA, 24 bp, Homo sapiens
gttggtgagtaccaggcaggctgt

SEQ ID NO: 4841 - DNA, 24 bp, Homo sapiens
tcctgggctataaggattggggtc

SEQ ID NO: 4842 - DNA, 22 bp, Homo sapiens
gaccccagaaaagcacttaaat

SEQ ID NO: 4843 - DNA, 22 bp, Homo sapiens
aatatgttgttattaactatag

SEQ ID NO: 4844 - DNA, 23 bp, Homo sapiens
ctcatgcttctgtgttctggaaa

SEQ ID NO: 4845 - DNA, 23 bp, Homo sapiens
aactgccattctaggacagctca

SEQ ID NO: 4846 - DNA, 22 bp, Homo sapiens
gcagggtagggggagcactgac

SEQ ID NO: 4847 - DNA, 22 bp, Homo sapiens
tctcccgggggcggtgttgggg

SEQ ID NO: 4848 - DNA, 22 bp, Homo sapiens
ttctttgcacagtggatatgac

SEQ ID NO: 4849 - DNA, 22 bp, Homo sapiens
gggaagctcactgttagaactg

SEQ ID NO: 4850 - DNA, 21 bp, Homo sapiens
ccaagcagagggcctgggtgg

SEQ ID NO: 4851 - DNA, 21 bp, Homo sapiens
ccatcactaacctctggaaat

SEQ ID NO: 4852 - DNA, 21 bp, Homo sapiens
cagggcggcgtgtgcagcagg

SEQ ID NO: 4853 - DNA, 21 bp, Homo sapiens
gctgccctccagatcccagaa

SEQ ID NO: 4854 - DNA, 26 bp, Homo sapiens
cctactcagggacacactgaggccac

SEQ ID NO: 4855 - DNA, 26 bp, Homo sapiens
aaccattcagatcagccacttgctga

SEQ ID NO: 4856 - DNA, 22 bp, Homo sapiens
aaggtcaacatttgggaagaaa

SEQ ID NO: 4857 - DNA, 22 bp, Homo sapiens
aattcttcccattaccgtgttt

SEQ ID NO: 4858 - DNA, 25 bp, Homo sapiens
gcggtgttggggtaggcccccggga

SEQ ID NO: 4859 - DNA, 25 bp, Homo sapiens
taacttaatcacaagcattgccata

SEQ ID NO: 4860 - DNA, 22 bp, Homo sapiens
ttcttcctcccatccctctcct

SEQ ID NO: 4861 - DNA, 22 bp, Homo sapiens
ttccaaaattgtatgagatcca

SEQ ID NO: 4862 - DNA, 26 bp, Homo sapiens
gcccccgggactggctgcggcggggc

SEQ ID NO: 4863 - DNA, 26 bp, Homo sapiens
gccatagactgtgataaattattcca

SEQ ID NO: 4864 - DNA, 22 bp, Homo sapiens
atggcaaagccccgcttcaaac

SEQ ID NO: 4865 - DNA, 22 bp, Homo sapiens
aaatcactgaaacaagatagaa

SEQ ID NO: 4866 - DNA, 22 bp, Homo sapiens
gtcacagaaacagccaaggtca

SEQ ID NO: 4867 - DNA, 22 bp, Homo sapiens
gaaaattaaagatagagatcaa

SEQ ID NO: 4868 - DNA, 24 bp, Homo sapiens
gcgtctcccgggggcggtgttggg

SEQ ID NO: 4869 - DNA, 24 bp, Homo sapiens
tataataatataagaggaaagaaa

SEQ ID NO: 4870 - DNA, 40 bp, Homo sapiens
ggctttctgcacaggaagtcgacaatggcagctttctccg

SEQ ID NO: 4871 - DNA, 40 bp, Homo sapiens
aatatgttgaatttactttcgacaatggcagctttctccg

SEQ ID NO: 4872 - DNA, 40 bp, Homo sapiens
ttataagggcaactgaattcgacaatggcagctttctccg

SEQ ID NO: 4873 - DNA, 40 bp, Homo sapiens
tgaaaaagtaagaaaatttcgacaatggcagctttctccg

SEQ ID NO: 4874 - DNA, 40 bp, Homo sapiens
aattttttattagccacatcgattaaacctgagaaattct

SEQ ID NO: 4875 - DNA, 40 bp, Homo sapiens
aatccctaaagttgtgcttcgacaatggcagctttctccg

SEQ ID NO: 4876 - DNA, 40 bp, Homo sapiens
cggagaaagctgccattgtcgaaaatatttttcttggaat

SEQ ID NO: 4877 - DNA, 40 bp, Homo sapiens
tggaacatgggagagaactcgatcagtcagtgagacttgc

SEQ ID NO: 4878 - DNA, 40 bp, Homo sapiens
cggagaaagctgccattgtcgatttagaaagtttaccctg

SEQ ID NO: 4879 - DNA, 40 bp, Homo sapiens
aggagcaagctgagaggttcgataaccatctgtcttctcc

SEQ ID NO: 4880 - DNA, 40 bp, Homo sapiens
gttcacaaacttgtggtttcgacaatggcagctttctccg

SEQ ID NO: 4881 - DNA, 40 bp, Homo sapiens
gttatattccagttatattcgacaatggcagctttctccg

SEQ ID NO: 4882 - DNA, 40 bp, Homo sapiens
aggagcaagctgagaggttcgaaaacttagtttttcaaaa

SEQ ID NO: 4883 - DNA, 40 bp, Homo sapiens
aggagcaagctgagaggttcgaacacctgcaaaggacagg

SEQ ID NO: 4884 - DNA, 40 bp, Homo sapiens
tagagtgtacagggatactcgacaatggcagctttctccg

SEQ ID NO: 4885 - DNA, 40 bp, Homo sapiens
aagctgatgaaagctaggtcgacaatggcagctttctccg

SEQ ID NO: 4886 - DNA, 40 bp, Homo sapiens
cggagaaagctgccattgtcgaaattttcttactttttca

SEQ ID NO: 4887 - DNA, 40 bp, Homo sapiens
tgtattaatgaatgaggttcgacaatggcagctttctccg

SEQ ID NO: 4888 - DNA, 40 bp, Homo sapiens
aattacattatcaaacaatcgacaatggcagctttctccg

SEQ ID NO: 4889 - DNA, 40 bp, Homo sapiens
cggagaaagctgccattgtcgatctctgtcttctagactt

SEQ ID NO: 4890 - DNA, 40 bp, Homo sapiens
tggaacatgggagagaactcgaaacacattttgctataga

SEQ ID NO: 4891 - DNA, 40 bp, Homo sapiens
gtgtattatgagctacgatcgacaatggcagctttctccg

SEQ ID NO: 4892 - DNA, 40 bp, Homo sapiens
taaaaattattaatgcaatcgacaatggcagctttctccg

SEQ ID NO: 4893 - DNA, 40 bp, Homo sapiens
cggagaaagctgccattgtcgaagacaacaagagtatgtg

SEQ ID NO: 4894 - DNA, 40 bp, Homo sapiens
cggagaaagctgccattgtcgattttgtttatcttttcaa

SEQ ID NO: 4895 - DNA, 40 bp, Homo sapiens
aggagcaagctgagaggttcgaaggcaaatgtgtcatata

SEQ ID NO: 4896 - DNA, 40 bp, Homo sapiens
cggagaaagctgccattgtcgagtatccctgtacactcta

SEQ ID NO: 4897 - DNA, 40 bp, Homo sapiens
cggagaaagctgccattgtcgattactaattcaatctgct

SEQ ID NO: 4898 - DNA, 40 bp, Homo sapiens
cggagaaagctgccattgtcgactcttaaataatctgaaa

SEQ ID NO: 4899 - DNA, 40 bp, Homo sapiens
gacttcattgtgcaaacatcgacaatggcagctttctccg

SEQ ID NO: 4900 - DNA, 40 bp, Homo sapiens
tttcagattctttaagagtcgacaatggcagctttctccg

SEQ ID NO: 4901 - DNA, 40 bp, Homo sapiens
cggagaaagctgccattgtcgacgaataatgtgtgatgag

SEQ ID NO: 4902 - DNA, 40 bp, Homo sapiens
aggagcaagctgagaggttcgatgtgtcatggatggaaat

SEQ ID NO: 4903 - DNA, 40 bp, Homo sapiens
aaggctttgcatcgtatttcgacaatggcagctttctccg

SEQ ID NO: 4904 - DNA, 40 bp, Homo sapiens
cggagaaagctgccattgtcgatgacatgagagaagagtt

SEQ ID NO: 4905 - DNA, 40 bp, Homo sapiens
cggagaaagctgccattgtcgagggaatagaaaggggaag

SEQ ID NO: 4906 - DNA, 40 bp, Homo sapiens
ctttgttctgaggggacatcgaggtggagattctggacgc

SEQ ID NO: 4907 - DNA, 40 bp, Homo sapiens
tggaacatgggagagaactcgaatctgaaaaagctaaact

SEQ ID NO: 4908 - DNA, 40 bp, Homo sapiens
tggtgatggacagagttatcgaaggcacagataaacttgc

SEQ ID NO: 4909 - DNA, 40 bp, Homo sapiens
aacatctgcttctgataatcgacaatggcagctttctccg

SEQ ID NO: 4910 - DNA, 40 bp, Homo sapiens
aggagcaagctgagaggttcgaaaactaaaaccagttgct

SEQ ID NO: 4911 - DNA, 40 bp, Homo sapiens
cggagaaagctgccattgtcgacacatgcaataacttgca

SEQ ID NO: 4912 - DNA, 40 bp, Homo sapiens
cggagaaagctgccattgtcgatgttccaaaataatctgc

SEQ ID NO: 4913 - DNA, 40 bp, Homo sapiens
atgaagcaacaggtctaatcgaggcaaaagaagcaggact

SEQ ID NO: 4914 - DNA, 40 bp, Homo sapiens
tggaacatgggagagaactcgatcttatattttcatggtg

SEQ ID NO: 4915 - DNA, 40 bp, Homo sapiens
cggagaaagctgccattgtcgagtttagtaggccgaatag

SEQ ID NO: 4916 - DNA, 40 bp, Homo sapiens
ctgcatccgtcctgagcatcgaatagccatggttaaaggc

SEQ ID NO: 4917 - DNA, 40 bp, Homo sapiens
cggagaaagctgccattgtcgatgcattttggttgcattt

SEQ ID NO: 4918 - DNA, 40 bp, Homo sapiens
aagaggagcagaagaaactcgagtattaagagaagatttt

SEQ ID NO: 4919 - DNA, 40 bp, Homo sapiens
tggaacatgggagagaactcgatgaatacacaaagctttc

SEQ ID NO: 4920 - DNA, 40 bp, Homo sapiens
cggagaaagctgccattgtcgacacctgcggtctcctgca

SEQ ID NO: 4921 - DNA, 40 bp, Homo sapiens
cggagaaagctgccattgtcgacttcctgtgcagaaagcc

SEQ ID NO: 4922 - DNA, 40 bp, Homo sapiens
cggagaaagctgccattgtcgaaagtaaattcaacatatt

SEQ ID NO: 4923 - DNA, 40 bp, Homo sapiens
cggagaaagctgccattgtcgaattcagttgcccttataa

SEQ ID NO: 4924 - DNA, 40 bp, Homo sapiens; identical to SEQ ID NO: 4886

SEQ ID NO: 4925 - DNA, 40 bp, Homo sapiens
agaatttctcaggtttaatcgatgtggctaataaaaaatt

SEQ ID NO: 4926 - DNA, 40 bp, Homo sapiens
cggagaaagctgccattgtcgaagcacaactttagggatt

SEQ ID NO: 4927 - DNA, 40 bp, Homo sapiens
attccaagaaaaatattttcgacaatggcagctttctccg

SEQ ID NO: 4928 - DNA, 40 bp, Homo sapiens
gcaagtctcactgactgatcgagttctctcccatgttcca

SEQ ID NO: 4929 - DNA, 40 bp, Homo sapiens
cagggtaaactttctaaatcgacaatggcagctttctccg

SEQ ID NO: 4930 - DNA, 40 bp, Homo sapiens
ggagaagacagatggttatcgaacctctcagcttgctcct

SEQ ID NO: 4931 - DNA, 40 bp, Homo sapiens
cggagaaagctgccattgtcgaaaccacaagtttgtgaac

SEQ ID NO: 4932 - DNA, 40 bp, Homo sapiens
cggagaaagctgccattgtcgaatataactggaatataac

SEQ ID NO: 4933 - DNA, 40 bp, Homo sapiens
ttttgaaaaactaagttttcgaacctctcagcttgctcct

SEQ ID NO: 4934 - DNA, 40 bp, Homo sapiens
cctgtcctttgcaggtgttcgaacctctcagcttgctcct

SEQ ID NO: 4935 - DNA, 40 bp, Homo sapiens; identical to SEQ ID NO: 4896

SEQ ID NO: 4936 - DNA, 40 bp, Homo sapiens
cggagaaagctgccattgtcgacctagctttcatcagctt

SEQ ID NO: 4937 - DNA, 40 bp, Homo sapiens; identical to SEQ ID NO: 4873

SEQ ID NO: 4938 - DNA, 40 bp, Homo sapiens
cggagaaagctgccattgtcgaacctcattcattaataca

SEQ ID NO: 4939 - DNA, 40 bp, Homo sapiens
cggagaaagctgccattgtcgattgtttgataatgtaatt

SEQ ID NO: 4940 - DNA, 40 bp, Homo sapiens
aagtctagaagacagagatcgacaatggcagctttctccg

SEQ ID NO: 4941 - DNA, 40 bp, Homo sapiens
tctatagcaaaatgtgtttcgagttctctcccatgttcca

SEQ ID NO: 4942 - DNA, 40 bp, Homo sapiens
cggagaaagctgccattgtcgatcgtagctcataatacac

SEQ ID NO: 4943 - DNA, 40 bp, Homo sapiens
cggagaaagctgccattgtcgattgcattaataattttta

SEQ ID NO: 4944 - DNA, 40 bp, Homo sapiens
cacatactcttgttgtcttcgacaatggcagctttctccg

SEQ ID NO: 4945 - DNA, 40 bp, Homo sapiens
ttgaaaagataaacaaaatcgacaatggcagctttctccg

SEQ ID NO: 4946 - DNA, 40 bp, Homo sapiens
tatatgacacatttgccttcgaacctctcagcttgctcct

SEQ ID NO: 4947 - DNA, 40 bp, Homo sapiens; identical to SEQ ID NO: 4884

SEQ ID NO: 4948 - DNA, 40 bp, Homo sapiens
agcagattgaattagtaatcgacaatggcagctttctccg

SEQ ID NO: 4949 - DNA, 40 bp, Homo sapiens
tttcagattatttaagagtcgacaatggcagctttctccg

SEQ ID NO: 4950 - DNA, 40 bp, Homo sapiens
cggagaaagctgccattgtcgatgtttgcacaatgaagtc

SEQ ID NO: 4951 - DNA, 40 bp, Homo sapiens
cggagaaagctgccattgtcgactcttaaagaatctgaaa

SEQ ID NO: 4952 - DNA, 40 bp, Homo sapiens
ctcatcacacattattcgtcgacaatggcagctttctccg

SEQ ID NO: 4953 - DNA, 40 bp, Homo sapiens
atttccatccatgacacatcgaacctctcagcttgctcct

SEQ ID NO: 4954 - DNA, 40 bp, Homo sapiens
cggagaaagctgccattgtcgaaatacgatgcaaagcctt

SEQ ID NO: 4955 - DNA, 40 bp, Homo sapiens
aactcttctctcatgtcatcgacaatggcagctttctccg

SEQ ID NO: 4956 - DNA, 40 bp, Homo sapiens
cttcccctttctattccctcgacaatggcagctttctccg

SEQ ID NO: 4957 - DNA, 40 bp, Homo sapiens
gcgtccagaatctccacctcgatgtcccctcagaacaaag

SEQ ID NO: 4958 - DNA, 40 bp, Homo sapiens
agtttagctttttcagattcgagttctctcccatgttcca

SEQ ID NO: 4959 - DNA, 40 bp, Homo sapiens
gcaagtttatctgtgccttcgataactctgtccatcacca

SEQ ID NO: 4960 - DNA, 40 bp, Homo sapiens
cggagaaagctgccattgtcgattatcagaagcagatgtt

SEQ ID NO: 4961 - DNA, 40 bp, Homo sapiens
agcaactggttttagttttcgaacctctcagcttgctcct

SEQ ID NO: 4962 - DNA, 40 bp, Homo sapiens
tgcaagttattgcatgtgtcgacaatggcagctttctccg

SEQ ID NO: 4963 - DNA, 40 bp, Homo sapiens
gcagattattttggaacatcgacaatggcagctttctccg

SEQ ID NO: 4964 - DNA, 40 bp, Homo sapiens
agtcctgcttcttttgcctcgattagacctgttgcttcat

SEQ ID NO: 4965 - DNA, 40 bp, Homo sapiens
caccatgaaaatataagatcgagttctctcccatgttcca

SEQ ID NO: 4966 - DNA, 40 bp, Homo sapiens
ctattcggcctactaaactcgacaatggcagctttctccg

SEQ ID NO: 4967 - DNA, 40 bp, Homo sapiens
gcctttaaccatggctattcgatgctcaggacggatgcag

SEQ ID NO: 4968 - DNA, 40 bp, Homo sapiens
aaatgcaaccaaaatgcatcgacaatggcagctttctccg

SEQ ID NO: 4969 - DNA, 40 bp, Homo sapiens
aaaatcttctcttaatactcgagtttcttctgctcctctt

SEQ ID NO: 4970 - DNA, 40 bp, Homo sapiens
gaaagctttgtgtattcatcgagttctctcccatgttcca

SEQ ID NO: 4971 - DNA, 40 bp, Homo sapiens
tgcaggagaccgcaggtgtcgacaatggcagctttctccg

SEQ ID NO: 4972 - DNA, 60 bp, Homo sapiens
tgatgcagttacagaaaagttggtgacatcgaattggaattttaaaattaagagtacata

SEQ ID NO: 4973 - DNA, 60 bp, Homo sapiens
tgatgcagttacagaaaagttggtgacatcgaaatcaaagctccagttaattcagagtcc

SEQ ID NO: 4974 - DNA, 60 bp, Homo sapiens
gaagtccaacaccgtgatgcaggattcatcgaatttaggcaccaaactatactagtcatc

SEQ ID NO: 4975 - DNA, 60 bp, Homo sapiens
cagtcagatagtgaggactcaacagatatcgattgttacaaaattcctcctaaaaatttc

SEQ ID NO: 4976 - DNA, 60 bp, Homo sapiens
tgatgcagttacagaaaagttggtgacatcgaattaccagcacctgttcatgagctgcca

SEQ ID NO: 4977 - DNA, 60 bp, Homo sapiens
atccgctacgagggcattctctacaccatcgagtagaaggaggagaataatacagagcag

SEQ ID NO: 4978 - DNA, 60 bp, Homo sapiens
gttaccctagccacttcacaaaatatgttcgaaaaaaataaaatatatgaatgctggatc

SEQ ID NO: 4979 - DNA, 60 bp, Homo sapiens
gagctagcccagacctactaaattagaatcgaggcaccagaaggttaagacaattgccca

SEQ ID NO: 4980 - DNA, 60 bp, Homo sapiens
gccagaaaatcgtaccatttcctttccttcgaagagatagttcacaatggatgacacagc

SEQ ID NO: 4981 - DNA, 60 bp, Homo sapiens
gaatggggtatgaatcatgcaactggcttcgaagtataatagtaagctacagaataattt

SEQ ID NO: 4982 - DNA, 60 bp, Homo sapiens
gtgctagccctgcttaaatgcacggaaatcgagaacaggatcagtttaagatgagatagc

SEQ ID NO: 4983 - DNA, 60 bp, Homo sapiens
gccagaaaatcgtaccatttcctttccttcgatgtatctattatatctatgtatctatat

SEQ ID NO: 4984 - DNA, 60 bp, Homo sapiens
tgatgcagttacagaaaagttggtgacatcgaagagcctctggcatgtacaggagcccac

SEQ ID NO: 4985 - DNA, 60 bp, Homo sapiens
ataaatgtttcagtataagcagtaggactcgatgttgccaaaaacaaaagaaaaacccca

SEQ ID NO: 4986 - DNA, 60 bp, Homo sapiens
gagaagtcgtaaaatgctaggtatttattcgaagctgggtcttctaggctttaggtaaat

SEQ ID NO: 4987 - DNA, 60 bp, Homo sapiens
gaagacccagagcttacacaaaatcatgtcgaaaaaaaaaataaaagggaatctgcataa

SEQ ID NO: 4988 - DNA, 60 bp, Homo sapiens
aattctcaagctcaaagtgctcgcagattcgaatgcctactactactaggaccacgcagg

SEQ ID NO: 4989 - DNA, 60 bp, Homo sapiens
taagactgactgaacgtatcaaggcctatcgaacaaacacaccttcaaacacatcacgcg

SEQ ID NO: 4990 - DNA, 60 bp, Homo sapiens
tgatgcagttacagaaaagttggtgacatcgagaacgaggcttaaaattatgtcccacga

SEQ ID NO: 4991 - DNA, 60 bp, Homo sapiens
gagtgagagtgatgcagtaatagcagtatcgatgtctttatctgaaaaatgagaataatc

SEQ ID NO: 4992 - DNA, 60 bp, Homo sapiens
gagaggccgttctaaaagcacatttgtatcgaaaatccatgggaatttcccattttgctc

SEQ ID NO: 4993 - DNA, 60 bp, Homo sapiens
aaaacccttctggaacatgggagagaactcgaaatttgattcaggataatttaaaaatat

SEQ ID NO: 4994 - DNA, 60 bp, Homo sapiens
cggcttcactctgcatccgtcctgagcatcgagctagattggtcaatatatgaatgagga

SEQ ID NO: 4995 - DNA, 60 bp, Homo sapiens
gttaccctagccacttcacaaaatatgttcgataaattctcataaaaataaaatggtgca

SEQ ID NO: 4996 - DNA, 60 bp, Homo sapiens
aaaacccttctggaacatgggagagaactcgaatcaggctaatcagcatatcagtcacct

SEQ ID NO: 4997 - DNA, 60 bp, Homo sapiens
aattctcaagctcaaagtgctcgcagattcgattgtaaactaagctatgttcggtagccc

SEQ ID NO: 4998 - DNA, 60 bp, Homo sapiens
aaaacccttctggaacatgggagagaactcgaaggtgaggaagctcacaggtgttgagca

SEQ ID NO: 4999 - DNA, 60 bp, Homo sapiens
ggcaggcaaatcatttaaggtcaggagttcgagaccagtctgagcaaccttgagaatccc

SEQ ID NO: 5000 - DNA, 60 bp, Homo sapiens
aaaacccttctggaacatgggagagaactcgatgcctcgcaaaatgacaattgagaggat

SEQ ID NO: 5001 - DNA, 60 bp, Homo sapiens
agagattgcatttaatctgtagattacatcgattaaacctgagaaattctgctccctccc

SEQ ID NO: 5002 - DNA, 60 bp, Homo sapiens
gcaaattctgagaaccaggcctgttctctcgagggcacatgggagatgttaggcgcggac

SEQ ID NO: 5003 - DNA, 60 bp, Homo sapiens
gatccctatttccatattacaaaaaccatcgaggccttcgtatgctcctcagcctgggca

SEQ ID NO: 5004 - DNA, 60 bp, Homo sapiens
aaaacccttctggaacatgggagagaactcgacacagtggtctgatgaatttcacttctt

SEQ ID NO: 5005 - DNA, 60 bp, Homo sapiens
tcttgccgggagtactcttcaaactccttcgaaaaggtcaagtaggcattaactgggctg

SEQ ID NO: 5006 - DNA, 60 bp, Homo sapiens
gttaccctagccacttcacaaaatatgttcgaagtatatttatacctttacatgatgagg

SEQ ID NO: 5007 - DNA, 60 bp, Homo sapiens
cttcctacgccggagaaagctgccattgtcgaataagaagaattgtcttgggccacacat

SEQ ID NO: 5008 - DNA, 60 bp, Homo sapiens
atccgctacgagggcattctctacaccatcgacagagtagaaacgtacttttctctcggt

SEQ ID NO: 5009 - DNA, 60 bp, Homo sapiens
gtttttgggtaccagcccttcacctgcgtcgacttcctgattctcccacgacgtccctgg

SEQ ID NO: 5010 - DNA, 60 bp, Homo sapiens
cttcctacgccggagaaagctgccattgtcgagtctgcggaaggaggaagaagctcattt

SEQ ID NO: 5011 - DNA, 60 bp, Homo sapiens
aaaacccttctggaacatgggagagaactcgaaagaaactgtcagtaaacagacaaccta

SEQ ID NO: 5012 - DNA, 60 bp, Homo sapiens
tgacataacttcaattcagctagtaacttcgagcaagggaagagtaaacaaccatgcctc

SEQ ID NO: 5013 - DNA, 60 bp, Homo sapiens
gaagacccagagcttacacaaaatcatgtcgaatgagaaagacgtaagttttattttaag

SEQ ID NO: 5014 - DNA, 60 bp, Homo sapiens
gaagtccaacaccgtgatgcaggattcatcgaaggttacccatcctttcgggttgctaat

SEQ ID NO: 5015 - DNA, 60 bp, Homo sapiens
agactcccctgagattgcactgctttattcgagctccctcgggaaacactgttgaaagga

SEQ ID NO: 5016 - DNA, 60 bp, Homo sapiens
ctcgttattagatgcattgtagacaacatcgatgagcatcaactgtcctagaattggctg

SEQ ID NO: 5017 - DNA, 60 bp, Homo sapiens
tgcgagataacttcaggtatctccatgctcgaagcaaaaaaaatgggacaacttgaagca

SEQ ID NO: 5018 - DNA, 60 bp, Homo sapiens
aaaacccttctggaacatgggagagaactcgataattttgatttttgttcttttttcttc

SEQ ID NO: 5019 - DNA, 60 bp, Homo sapiens
aattctcaagctcaaagtgctcgcagattcgaggaagttcagagaacacaatgcaagatt

SEQ ID NO: 5020 - DNA, 60 bp, Homo sapiens
ccacgctcagtcaataacactaaaacactcgactaagtttcttcatgaaagtaaatggtg

SEQ ID NO: 5021 - DNA, 60 bp, Homo sapiens
cggcttcactctgcatccgtcctgagcatcgaatctctaggtttccattggaagaacagg

SEQ ID NO: 5022 - DNA, 24 bp, Homo sapiens
attggccggccagcgctgcctggg

SEQ ID NO: 5023 - DNA, 24 bp, Homo sapiens
cacacccagccaaaataagctttt

SEQ ID NO: 5024 - DNA, 24 bp, Homo sapiens
gatctttggctccgtcctgccatg

SEQ ID NO: 5025 - DNA, 24 bp, Homo sapiens
atttaactttctacgcaagtctcc

SEQ ID NO: 5026 - DNA, 22 bp, Homo sapiens
atgtttgtgaaatgcagggccc

SEQ ID NO: 5027 - DNA, 22 bp, Homo sapiens
atcacacagaatattaaaaaga

SEQ ID NO: 5028 - DNA, 26 bp, Homo sapiens
taagactaaggccccaaaagccagaa

SEQ ID NO: 5029 - DNA, 26 bp, Homo sapiens
tggtgggtgagtgatcctggaggtgg

SEQ ID NO: 5030 - DNA, 22 bp, Homo sapiens
ctgcagacaccactcggatcag

SEQ ID NO: 5031 - DNA, 22 bp, Homo sapiens
gaactagaatgtcaaaagggca

SEQ ID NO: 5032 - DNA, 21 bp, Homo sapiens
gccgcggcccggcgctccttc

SEQ ID NO: 5033 - DNA, 21 bp, Homo sapiens
tgtaaggtgtgtcctgataac

SEQ ID NO: 5034 - DNA, 25 bp, Homo sapiens
atattttgctaagcctataatatta

SEQ ID NO: 5035 - DNA, 25 bp, Homo sapiens
tcagccctgacaaaagactgtgcca

SEQ ID NO: 5036 - DNA, 23 bp, Homo sapiens
ggtcaagatcaggagtccacaga

SEQ ID NO: 5037 - DNA, 23 bp, Homo sapiens
cccctggcatgataagaggcagt

SEQ ID NO: 5038 - DNA, 21 bp, Homo sapiens
ctgaataattaatatactcct

SEQ ID NO: 5039 - DNA, 21 bp, Homo sapiens
ataaaagagtgccactgatta

SEQ ID NO: 5040 - DNA, 26 bp, Homo sapiens
aacccaagggcatatatggggatgac

SEQ ID NO: 5041 - DNA, 26 bp, Homo sapiens
ctgcacggttgctcctgagagcagtc

SEQ ID NO: 5042 - DNA, 24 bp, Homo sapiens
gaaaagaaaaaaagaaaagtgata

SEQ ID NO: 5043 - DNA, 24 bp, Homo sapiens
gtataaaatgaaaaccttcccaaa

SEQ ID NO: 5044 - DNA, 25 bp, Homo sapiens
agggacctcctctgaataattaata

SEQ ID NO: 5045 - DNA, 25 bp, Homo sapiens
aaatagatacatagaatacataaat

SEQ ID NO: 5046 - DNA, 22 bp, Homo sapiens
tttggctccgtcctgccatgaa

SEQ ID NO: 5047 - DNA, 22 bp, Homo sapiens
gcactccaccatagggatggtg

SEQ ID NO: 5048 - DNA, 22 bp, Homo sapiens
gatgcaatgtaattcacttgtt

SEQ ID NO: 5049 - DNA, 22 bp, Homo sapiens
tgaaaaccctccaactttcaag

SEQ ID NO: 5050 - DNA, 23 bp, Homo sapiens
aggaggtaaaaagggaagcgcag

SEQ ID NO: 5051 - DNA, 23 bp, Homo sapiens
agtatgacacttcaagaatcttg

SEQ ID NO: 5052 - DNA, 23 bp, Homo sapiens
cttccttctgtccatgaccaacc

SEQ ID NO: 5053 - DNA, 23 bp, Homo sapiens
tcttaaacatcatccacctcttt

SEQ ID NO: 5054 - DNA, 22 bp, Homo sapiens
ttctgagtgtagcagggctctg

SEQ ID NO: 5055 - DNA, 22 bp, Homo sapiens
ataagagggaaagatggcatga

SEQ ID NO: 5056 - DNA, 25 bp, Homo sapiens
gccttatcagtcaaatattgaagga

SEQ ID NO: 5057 - DNA, 25 bp, Homo sapiens
agtgtgtacaggtgagtttgtccgt

SEQ ID NO: 5058 - DNA, 23 bp, Homo sapiens
gctgcctgggccttgaaggcaga

SEQ ID NO: 5059 - DNA, 23 bp, Homo sapiens
cgccgtgaactcactcacttgag

SEQ ID NO: 5060 - DNA, 24 bp, Homo sapiens
ggagtcacacagggaagcacaggc

SEQ ID NO: 5061 - DNA, 24 bp, Homo sapiens
atatcttctgttcacaaatgcttg

SEQ ID NO: 5062 - DNA, 26 bp, Homo sapiens
tacactctaagaggctgagacagcaa

SEQ ID NO: 5063 - DNA, 26 bp, Homo sapiens
ccaagaaacctgtaaaagcaggtgca

SEQ ID NO: 5064 - DNA, 25 bp, Homo sapiens
gaagaaaaagaaaatgttggatcat

SEQ ID NO: 5065 - DNA, 25 bp, Homo sapiens
taagattactttcgtgttcaaggtc

SEQ ID NO: 5066 - DNA, 24 bp, Homo sapiens
ttggcccaaggggctgtcctggtt

SEQ ID NO: 5067 - DNA, 24 bp, Homo sapiens
tataataggtcagcactggagaat

SEQ ID NO: 5068 - DNA, 21 bp, Homo sapiens
taacaatggttctagagtcag

SEQ ID NO: 5069 - DNA, 21 bp, Homo sapiens
ctatccattttagccttactt

SEQ ID NO: 5070 - DNA, 22 bp, Homo sapiens
ttggatcatttacaaatcaaat

SEQ ID NO: 5071 - DNA, 22 bp, Homo sapiens
ttcttttgcacagcatagtgaa

SEQ ID NO: 5072 - DNA, 23 bp, Homo sapiens
gctctgtactagtctgctttggc

SEQ ID NO: 5073 - DNA, 23 bp, Homo sapiens
tactagttgcagaatgtgataaa

SEQ ID NO: 5074 - DNA, 24 bp, Homo sapiens
atttgggaagaaaaagaaaatgtt

SEQ ID NO: 5075 - DNA, 24 bp, Homo sapiens
tcctgggtcatcagtccttgacca

SEQ ID NO: 5076 - DNA, 26 bp, Homo sapiens
aaaaataaatttaaataaaataaaca

SEQ ID NO: 5077 - DNA, 26 bp, Homo sapiens
ggagtgcaatggcgcgatctcggctc

SEQ ID NO: 5078 - DNA, 22 bp, Homo sapiens
caacatttgggaagaaaaagaa

SEQ ID NO: 5079 - DNA, 22 bp, Homo sapiens
agtgcctaactaccaaaggaag

SEQ ID NO: 5080 - DNA, 26 bp, Homo sapiens
tgtcccttgaaattccctataatttg

SEQ ID NO: 5081 - DNA, 26 bp, Homo sapiens
aaatctcaggacataaattcagaatt

SEQ ID NO: 5082 - DNA, 24 bp, Homo sapiens
gccagctgggcagggtccaggcat

SEQ ID NO: 5083 - DNA, 24 bp, Homo sapiens
gagggggccttggggcctggttcc

SEQ ID NO: 5084 - DNA, 24 bp, Homo sapiens
gccagctgatccagcaactgagga

SEQ ID NO: 5085 - DNA, 24 bp, Homo sapiens
gcaaaaagacgtcagggagctttt

SEQ ID NO: 5086 - DNA, 24 bp, Homo sapiens
gtcacagaaacagccaaggtcaac

SEQ ID NO: 5087 - DNA, 24 bp, Homo sapiens
cacccaatagatccacagacagat

SEQ ID NO: 5088 - DNA, 21 bp, Homo sapiens
aaagaacaactaagctgctat

SEQ ID NO: 5089 - DNA, 21 bp, Homo sapiens
aagtatatgaactatattttg

SEQ ID NO: 5090 - DNA, 25 bp, Homo sapiens
tgctaagcctataatattaaatcag

SEQ ID NO: 5091 - DNA, 25 bp, Homo sapiens
tcttgaactcccgacctcaggtaat

SEQ ID NO: 5092 - DNA, 21 bp, Homo sapiens
gtgttggggtaggcccccggg

SEQ ID NO: 5093 - DNA, 21 bp, Homo sapiens
aacccatggtctgtgggccat

SEQ ID NO: 5094 - DNA, 21 bp, Homo sapiens
gagcgcaggagcgggcggcca

SEQ ID NO: 5095 - DNA, 21 bp, Homo sapiens
ttttgggccatgaggtgacac

SEQ ID NO: 5096 - DNA, 21 bp, Homo sapiens
cgccattccaccccacttcag

SEQ ID NO: 5097 - DNA, 21 bp, Homo sapiens
cccgcctacccccaccacaag

SEQ ID NO: 5098 - DNA, 24 bp, Homo sapiens
ccgggactggctgcggcggggcag

SEQ ID NO: 5099 - DNA, 24 bp, Homo sapiens
ttttggtgcagtttcagcataaca

SEQ ID NO: 5100 - DNA, 24 bp, Homo sapiens
ttacaaatcaaatgaccccagaaa

SEQ ID NO: 5101 - DNA, 24 bp, Homo sapiens
ttaatggggttatttgtttgtttt

SEQ ID NO: 5102 - DNA, 23 bp, Homo sapiens
tttttgctggtcactatgaggcc

SEQ ID NO: 5103 - DNA, 23 bp, Homo sapiens
gtttcagaagacagtgaagaaaa

SEQ ID NO: 5104 - DNA, 23 bp, Homo sapiens
ttgtgctttcatggtgtccctgc

SEQ ID NO: 5105 - DNA, 23 bp, Homo sapiens
agaaaatgagaaaagaaataggg

SEQ ID NO: 5106 - DNA, 23 bp, Homo sapiens
tgtttagagcagagcacagggcc

SEQ ID NO: 5107 - DNA, 23 bp, Homo sapiens
tcctttcccttctctgcagcctc

SEQ ID NO: 5108 - DNA, 21 bp, Homo sapiens
actcaataatcagctcacttt

SEQ ID NO: 5109 - DNA, 21 bp, Homo sapiens
gcaatgacagaggaaggttta

SEQ ID NO: 5110 - DNA, 25 bp, Homo sapiens
ttagatcgctttttgttcaaaatct

SEQ ID NO: 5111 - DNA, 25 bp, Homo sapiens
atgtggcattaaaaatgccagacca

SEQ ID NO: 5112 - DNA, 21 bp, Homo sapiens
tgaccttaggtgatctgtcca

SEQ ID NO: 5113 - DNA, 21 bp, Homo sapiens
gataaatgcatacctgattgc

SEQ ID NO: 5114 - DNA, 24 bp, Homo sapiens
aacatttgggaagaaaaagaaaat

SEQ ID NO: 5115 - DNA, 24 bp, Homo sapiens
catggcctgaactgattttccagg

SEQ ID NO: 5116 - DNA, 25 bp, Homo sapiens
catgcatggcctcctggccaaggac

SEQ ID NO: 5117 - DNA, 25 bp, Homo sapiens
aggtatggttttcctctagcttctt

SEQ ID NO: 5118 - DNA, 25 bp, Homo sapiens
tgctttgggtgcaaccacccactct

SEQ ID NO: 5119 - DNA, 25 bp, Homo sapiens
aggaaggaatttagaattctcgtct

SEQ ID NO: 5120 - DNA, 21 bp, Homo sapiens
tggttctctaaggagtaattt

SEQ ID NO: 5121 - DNA, 21 bp, Homo sapiens
aatcatgatgtcagaggcttc

SEQ ID NO: 5122 - DNA, 60 bp, Homo sapiens
ccacgctcagtcaataacactaaaacactcgactagatttcatacaatctagtagaattt

SEQ ID NO: 5123 - DNA, 60 bp, Homo sapiens
gaacaggactgtactgtgggggacctactcgaaaggttctcttgactctgaaaaacagaa

SEQ ID NO: 5124 - DNA, 60 bp, Homo sapiens
ggaagctagttaccatgttctttgggtctcgattcggaccattgcccggcaagccgcacc

SEQ ID NO: 5125 - DNA, 60 bp, Homo sapiens
cagaaccttgaaggcatgagccccagactcgagaaggcaacattgattgagtgaaagaat

SEQ ID NO: 5126 - DNA, 60 bp, Homo sapiens
tttatgtgaacccttgttgtggaaaatgtcgaggatctagaactagaattaccatttgac

SEQ ID NO: 5127 - DNA, 60 bp, Homo sapiens
taacacacctcaaggaaggatacgtacctcgatctcaattggaacggttttctgagtttt

SEQ ID NO: 5128 - DNA, 60 bp, Homo sapiens
attgctaccatggtgatggacagagttatcgaaggcacagataaacttgccgaggaccct

SEQ ID NO: 5129 - DNA, 60 bp, Homo sapiens
agaggacaaataactgatttctcttctttcgactccagagtaggtcacccatccctgcac

SEQ ID NO: 5130 - DNA, 60 bp, Homo sapiens
aaaacccttctggaacatgggagagaactcgatcacttgttccaagtaaaagcaagagag

SEQ ID NO: 5131 - DNA, 60 bp, Homo sapiens
gcccaggtcgggcatctgttgtattccatcgagggcacatgggagatgttaggcgcggac

SEQ ID NO: 5132 - DNA, 60 bp, Homo sapiens
gcattgagccaagagcaaaaaataagagtcgaagtatttcctattagtacttgggatagt

SEQ ID NO: 5133 - DNA, 60 bp, Homo sapiens
acaactctccttgtcctctgaggcgctctcgaatgatctaaaaaaaaaaaaagttagacc

SEQ ID NO: 5134 - DNA, 60 bp, Homo sapiens
gaacaggactgtactgtgggggacctactcgagacaccagactcatgagtaaagctatct

SEQ ID NO: 5135 - DNA, 60 bp, Homo sapiens
aagaacagagttggagagcggatactactcgaacaaacacaccttcaaacacatcacgcg

SEQ ID NO: 5136 - DNA, 60 bp, Homo sapiens
cgggaatcatcacaggaatcgcgcccattcgagaatgtttcagacagtagagtaagatag

SEQ ID NO: 5137 - DNA, 60 bp, Homo sapiens
ccagagtcaaggcaggcaaagagactcctcgaacaaccattttggaaacaaatttcatat

SEQ ID NO: 5138 - DNA, 60 bp, Homo sapiens
gctggtcagctacgtccacccattcccttcgatactaggttagccatgctgacttttgat

SEQ ID NO: 5139 - DNA, 60 bp, Homo sapiens
tgcctccaatgcgcatgccaaccccaaatcgactctcttttcctctgagttcaacatttt

SEQ ID NO: 5140 - DNA, 60 bp, Homo sapiens
ctgtgggaaaagacacaaaccccttagctcgatttgacattacattatggctttgtaaca

SEQ ID NO: 5141 - DNA, 60 bp, Homo sapiens
ttaggattcatcaaggaagcaactgcaatcgaacataattttacaatctttaactttttt

SEQ ID NO: 5142 - DNA, 60 bp, Homo sapiens
gtttttgggtaccagcccttcacctgcgtcgacagggaaatatctatatctcggcagaga

SEQ ID NO: 5143 - DNA, 60 bp, Homo sapiens
atgaagccagagttcagtatgagggttttcgagaatgagtaatttataaagaaaagaggt

SEQ ID NO: 5144 - DNA, 60 bp, Homo sapiens
tccaaagaaattaattacctccaggagatcgagaccatcccagctaacaatggtgaaacc

SEQ ID NO: 5145 - DNA, 60 bp, Homo sapiens
gcccaaactgaaaacctatgagttattctcgacttttccatctataaattggggttgtta

SEQ ID NO: 5146 - DNA, 60 bp, Homo sapiens
cgggaatcatcacaggaatcgcgcccattcgatgagcatcaactgtcctagaattggctg

SEQ ID NO: 5147 - DNA, 60 bp, Homo sapiens
agctagtctagtaataattaaaggcagctcgattaggatgaacccgggcacttagccgtg

SEQ ID NO: 5148 - DNA, 60 bp, Homo sapiens
ctgtgtaacttttgagacctggcctaaatcgacttcattaagaatatctttgtgttccac

SEQ ID NO: 5149 - DNA, 60 bp, Homo sapiens
aaaacccttctggaacatgggagagaactcgaccgtataggacatcttcaaattacaaaa

SEQ ID NO: 5150 - DNA, 60 bp, Homo sapiens
gccaacctcggcggtcagttccctgctatcgattcatattatagctccatctgcagcaga

SEQ ID NO: 5151 - DNA, 60 bp, Homo sapiens
ccacgctcagtcaataacactaaaacactcgacttatattaagaggatatacactgtggt

SEQ ID NO: 5152 - DNA, 60 bp, Homo sapiens
atccgctacgagggcattctctacaccatcgatgtgtaggcctttccattccatttattc

SEQ ID NO: 5153 - DNA, 60 bp, Homo sapiens
tgacataacttcaattcagctagtaacttcgagcttcacatccaaagtacctggaacttt

SEQ ID NO: 5154 - DNA, 60 bp, Homo sapiens
gttaccctagccacttcacaaaatatgttcgaaatcagcagtattggtaggtagaagaat

SEQ ID NO: 5155 - DNA, 60 bp, Homo sapiens
ccagaaaggtacccattaggcgtcaccttcgatgaattaatatatgccaagtgcctaggc

SEQ ID NO: 5156 - DNA, 60 bp, Homo sapiens
cgaggtgggcgatccctaggtcaggagatcgagaccgcccaccctggccagtaactagat

SEQ ID NO: 5157 - DNA, 60 bp, Homo sapiens
ggaggatcaagacttccagtgacaaatatcgaggtacagtgccaagctgtacgggtcact

SEQ ID NO: 5158 - DNA, 60 bp, Homo sapiens
aggggattttacatgtgcttgtctgacatcgaggaagacatctttttcctgcttctgcca

SEQ ID NO: 5159 - DNA, 60 bp, Homo sapiens
gagaaggggaaacacaatgtgtctgttatcgaagctgacagaaagaacagtttctcttac

SEQ ID NO: 5160 - DNA, 60 bp, Homo sapiens
ccacgctcagtcaataacactaaaacactcgacctttccagtaggatcttcccatatttc

SEQ ID NO: 5161 - DNA, 60 bp, Homo sapiens
gccgagttgggcagatcattttaggagttcgagacagcctgggcaacagggtgagactcc

SEQ ID NO: 5162 - DNA, 60 bp, Homo sapiens
gttaccctagccacttcacaaaatatgttcgagtgggcgaaagaacctgttaacttaaag

SEQ ID NO: 5163 - DNA, 60 bp, Homo sapiens
agctcccaaaaattctgtaagggggccttcgatctcattccgaacagggtaaagtaggga

SEQ ID NO: 5164 - DNA, 60 bp, Homo sapiens
tgactcttcagacctggctcatttcacgtcgattctggtgtttccagcaagtttggacac

SEQ ID NO: 5165 - DNA, 60 bp, Homo sapiens
cacctcctcttgagcagaaataaaaggttcgacttctaccccatctcaagctcaccccct

SEQ ID NO: 5166 - DNA, 25 bp, Homo sapiens
tccgcttctgaagaaactaagatcc

SEQ ID NO: 5167 - DNA, 25 bp, Homo sapiens
ccttgtacataaacaatttctaacc

SEQ ID NO: 5168 - DNA, 25 bp, Homo sapiens
tcacagcctctgcccatgtttcacc

SEQ ID NO: 5169 - DNA, 25 bp, Homo sapiens
acactctgtcttaaaaaattaatta

SEQ ID NO: 5170 - DNA, 22 bp, Homo sapiens
ttccccaggcaggagtggctgg

SEQ ID NO: 5171 - DNA, 22 bp, Homo sapiens
tgaatgccactgaattcaataa

SEQ ID NO: 5172 - DNA, 21 bp, Homo sapiens
tgggggcagcaccccgggatc

SEQ ID NO: 5173 - DNA, 21 bp, Homo sapiens
tacataacacaaaattaacca

SEQ ID NO: 5174 - DNA, 26 bp, Homo sapiens
aagaggctcagggaagaggctgtttt

SEQ ID NO: 5175 - DNA, 26 bp, Homo sapiens
atcattaatggacatttgggttggtt

SEQ ID NO: 5176 - DNA, 26 bp, Homo sapiens
aggccagggcatcctggctgagcaca

SEQ ID NO: 5177 - DNA, 26 bp, Homo sapiens
agtcaaactctgactgtttgcaaatg

SEQ ID NO: 5178 - DNA, 25 bp, Homo sapiens
cacatttttttctgttctaagaact

SEQ ID NO: 5179 - DNA, 25 bp, Homo sapiens
ctctgcatagccccaagaggacagc

SEQ ID NO: 5180 - DNA, 26 bp, Homo sapiens
aaaccatcaggtcttgtggcctaaag

SEQ ID NO: 5181 - DNA, 26 bp, Homo sapiens
ttgaaaaaccacagacaattgcaaaa

SEQ ID NO: 5182 - DNA, 25 bp, Homo sapiens
gaaaatgttggatcatttacaaatc

SEQ ID NO: 5183 - DNA, 25 bp, Homo sapiens
ccttatattccttactctagttgtg

SEQ ID NO: 5184 - DNA, 21 bp, Homo sapiens
gtgacgggagggtgcttctgc

SEQ ID NO: 5185 - DNA, 21 bp, Homo sapiens
taaaagagctggaggcagatt

SEQ ID NO: 5186 - DNA, 22 bp, Homo sapiens
ttattccctttaataaatgagg

SEQ ID NO: 5187 - DNA, 22 bp, Homo sapiens
ccaggctgatcttgaactcctg

SEQ ID NO: 5188 - DNA, 24 bp, Homo sapiens
ctgcatggtattatttgtctgtct

SEQ ID NO: 5189 - DNA, 24 bp, Homo sapiens
ttgcttgtgatcgcagaatgtagt

SEQ ID NO: 5190 - DNA, 21 bp, Homo sapiens
tccctctcagaacgaaagcag

SEQ ID NO: 5191 - DNA, 21 bp, Homo sapiens
cttcagcatataattttcaaa

SEQ ID NO: 5192 - DNA, 25 bp, Homo sapiens
aaaatcccagcaagttattctgtgg

SEQ ID NO: 5193 - DNA, 25 bp, Homo sapiens
tgatcaagtgtgggggcgagtgttg

SEQ ID NO: 5194 - DNA, 25 bp, Homo sapiens
agaataggttttcatatatcaaaaa

SEQ ID NO: 5195 - DNA, 25 bp, Homo sapiens
tcctatgaggagggtatttttatta

SEQ ID NO: 5196 - DNA, 21 bp, Homo sapiens
aacgggctgcaccagctctct

SEQ ID NO: 5197 - DNA, 21 bp, Homo sapiens
tactgcatatgtgcatacaat

SEQ ID NO: 5198 - DNA, 22 bp, Homo sapiens
gaaagcaccctggatgcttggc

SEQ ID NO: 5199 - DNA, 22 bp, Homo sapiens
ctggataaaaatatgagaccca

SEQ ID NO: 5200 - DNA, 25 bp, Homo sapiens
accatatctgtacctaggcagagac

SEQ ID NO: 5201 - DNA, 25 bp, Homo sapiens
aagcacctctgattgtctaagtgga

SEQ ID NO: 5202 - DNA, 24 bp, Homo sapiens
ctcctacatgggtcccaccgcccc

SEQ ID NO: 5203 - DNA, 24 bp, Homo sapiens
gttcaggaaaggaggggtcctggc

SEQ ID NO: 5204 - DNA, 25 bp, Homo sapiens
gtaggataacgttgctcatgtatta

SEQ ID NO: 5205 - DNA, 25 bp, Homo sapiens
ctggaaaaaacctaagtacatatat

SEQ ID NO: 5206 - DNA, 26 bp, Homo sapiens
ataactgagattattaattgcggtaa

SEQ ID NO: 5207 - DNA, 26 bp, Homo sapiens
ggttctcagggtccaggattccagga

SEQ ID NO: 5208 - DNA, 21 bp, Homo sapiens
gataaagcctacataattttg

SEQ ID NO: 5209 - DNA, 21 bp, Homo sapiens
aagtttgtggcacctccttcc

SEQ ID NO: 5210 - DNA, 23 bp, Homo sapiens
agtcctatgcagggttagctctg

SEQ ID NO: 5211 - DNA, 23 bp, Homo sapiens
ctcccaggttcaagcgattcttc

SEQ ID NO: 5212 - DNA, 26 bp, Homo sapiens
ctgctctctctgggtggccgttgttc

SEQ ID NO: 5213 - DNA, 26 bp, Homo sapiens
cccaaaatgctggggttataggtatg

SEQ ID NO: 5214 - DNA, 25 bp, Homo sapiens
tattccttacagctcctgattaact

SEQ ID NO: 5215 - DNA, 25 bp, Homo sapiens
atacacatgtggcattaaaaatgcc

SEQ ID NO: 5216 - DNA, 26 bp, Homo sapiens
tggcctctcattagctttacaaaggc

SEQ ID NO: 5217 - DNA, 26 bp, Homo sapiens
tggtccgtgtttgttacagcttgagc

SEQ ID NO: 5218 - DNA, 26 bp, Homo sapiens
atttcattgagatgtggggactgggg

SEQ ID NO: 5219 - DNA, 26 bp, Homo sapiens
accaatttcaatgacaaatgcatggt

SEQ ID NO: 5220 - DNA, 24 bp, Homo sapiens
agaaacagccaaggtcaacatttg

SEQ ID NO: 5221 - DNA, 24 bp, Homo sapiens
gctttgcatgattatccaagtaca

SEQ ID NO: 5222 - DNA, 26 bp, Homo sapiens
gagtgaagaggaagaagagggagaag

SEQ ID NO: 5223 - DNA, 26 bp, Homo sapiens
agtaagcaaggcagctcctgcctgga

SEQ ID NO: 5224 - DNA, 23 bp, Homo sapiens
tctgaagaaactaagatccaggg

SEQ ID NO: 5225 - DNA, 23 bp, Homo sapiens
tacatatgtatgtatgtatatat

SEQ ID NO: 5226 - DNA, 21 bp, Homo sapiens
aggagcgggcggccaggccac

SEQ ID NO: 5227 - DNA, 21 bp, Homo sapiens
tagccacaaggaacagaaagg

SEQ ID NO: 5228 - DNA, 22 bp, Homo sapiens
ttgctggtcactatgaggcctg

SEQ ID NO: 5229 - DNA, 22 bp, Homo sapiens
gagtgtccaggctaaacaggcc

SEQ ID NO: 5230 - DNA, 26 bp, Homo sapiens
acaatggttctagagtcaggacgtta

SEQ ID NO: 5231 - DNA, 26 bp, Homo sapiens
tagcaaaacagcagcaatagcagttc

SEQ ID NO: 5232 - DNA, 22 bp, Homo sapiens
gagtcggtggtttttagtatat

SEQ ID NO: 5233 - DNA, 22 bp, Homo sapiens
taaaaaagctgtaagtgtcacc

SEQ ID NO: 5234 - DNA, 22 bp, Homo sapiens
caaaaataatagcaaaagtagg

SEQ ID NO: 5235 - DNA, 22 bp, Homo sapiens
tacttactgatgcccaacaaag

SEQ ID NO: 5236 - DNA, 25 bp, Homo sapiens
tggaggagggaggagtcaagtgagg

SEQ ID NO: 5237 - DNA, 25 bp, Homo sapiens
tgctgtgagattaacttctgatcac

SEQ ID NO: 5238 - DNA, 23 bp, Homo sapiens
tcggttctgattttctccaggaa

SEQ ID NO: 5239 - DNA, 23 bp, Homo sapiens
aagtgagtctggtaagggactca

SEQ ID NO: 5240 - DNA, 26 bp, Homo sapiens
tggagggtacgtcccaagacgatggt

SEQ ID NO: 5241 - DNA, 26 bp, Homo sapiens
tgaggactgggaagaagttgaaaagc

SEQ ID NO: 5242 - DNA, 22 bp, Homo sapiens
ccagattaacgaccattactag

SEQ ID NO: 5243 - DNA, 22 bp, Homo sapiens
aaaccagctcctggattcattg

SEQ ID NO: 5244 - DNA, 21 bp, Homo sapiens
ctatttctttttaccatttta

SEQ ID NO: 5245 - DNA, 21 bp, Homo sapiens
caataccctaaaacaacctca

SEQ ID NO: 5246 - DNA, 23 bp, Homo sapiens
atattttgctaagcctataatat

SEQ ID NO: 5247 - DNA, 23 bp, Homo sapiens
ctttaagtcaatatctccttaaa

SEQ ID NO: 5248 - DNA, 26 bp, Homo sapiens
agggaccataagcccaattcacactt

SEQ ID NO: 5249 - DNA, 26 bp, Homo sapiens
cggcggctctggcccagcctgcggcc

SEQ ID NO: 5250 - DNA, 21 bp, Homo sapiens
ctcaaagcagcaggaagtgat

SEQ ID NO: 5251 - DNA, 21 bp, Homo sapiens
ggtgcccctgcacaggatggc
